(19) United States
(12) Patent Application Publication
(10) Pub. No.: US 2010/0003684 A1
(43) Pub. Date: Jan. 7, 2010

(54) SINGLE COPY GENOMIC HYBRIDIZATION PROBES AND METHODS OF GENERATING SAME

(75) Inventors: Joan H. M. Knoll, London (CA); Peter K. Rogan, London (CA)

Correspondence Address: POLSINELLI SHUGHART PC, 700 W. 47TH STREET, SUITE 1000, KANSAS CITY, MO, 64112-1802, US

(73) Assignee: The Children's Mercy Hospital, Kansas City, MO (US)

(21) Appl. No.: 12/427,111

(22) Filed: Apr. 21, 2009

Related U.S. Application Data
(63) Continuation of application No. 10/786,970, filed on Feb. 24, 2004, now abandoned.
Application No. 10/786,970 is a continuation of application No. 09/573,080, filed on May 16, 2000, now Pat. No. 6,828,097.

(51) Int. Cl. C12Q 1/68; C07H 21/04

(52) U.S. Cl. 435/6; 536/24.31; 536/25.3

(57) ABSTRACT

Nucleic acid (e.g., DNA) hybridization probes are described which comprise a labeled, single copy nucleic acid which hybridizes to a deduced single copy sequence interval in target nucleic acid of known sequence. The probes, which are essentially free of repetitive sequences, can be used in hybridization analyses without adding repetitive sequence-blocking nucleic acids. This allows rapid and accurate detection of chromosomal abnormalities. The probes are preferably designed by first determining the sequence of at least one single copy interval in a target nucleic acid sequence, and developing corresponding hybridization probes which hybridize to at least a part of the deduced single copy sequence. In practice, the sequences of the target and of known genomic repetitive sequence representatives are compared in order to deduce locations of the single copy sequence intervals. The single copy probes can be developed by any variety of methods, such as PCR amplification, restriction or exonuclease digestion of purified genomic fragments, or direct synthesis of DNA sequences. This is followed by labeling of the probes and hybridization to a target sequence.

### RELATED APPLICATION

[0001] This application is a continuation of application Ser. No. 10/786,970, filed Feb. 24, 2004, which is a continuation of application Ser. No. 09/573,080, filed May 16, 2000, now U.S. Pat. No. 6,828,097 issued Dec. 7, 2004. The teachings and contents of all of which are hereby incorporated by reference.

### SEQUENCE LISTING

[0002] The sequence listing for this application is identical to the sequence listing that was accepted for application Ser. No. 09/573,080, filed May 16, 2000. Use of this compliance sequence listing for the present application is respectfully requested. The computer readable copy submitted for this application is identical to the previously accepted readable copy.

### BACKGROUND OF THE INVENTION

[0003] 1. Field of the Invention

[0004] The present invention is broadly concerned with a method for designing single copy hybridization probes useful in the fields of cytogenetics and molecular genetics for determining the presence of specific nucleic acid sequences in a sample of eukaryotic origin, e.g., the probes may be used to analyze specific chromosomal locations by in situ hybridization as a detection of acquired or inherited genetic diseases. More particularly, the invention pertains to such probes, hybridization methods of use thereof and techniques for developing the probes, where the probes are essentially free of genomic repeat sequences, thereby eliminating the need for disabling of repetitive sequences which is required with conventional probes.

[0005] 2. Description of the Prior Art

[0006] Chromosome abnormalities are associated with various genetic disorders, which may be inherited or acquired. These abnormalities are of three general types, extra or missing individual chromosomes (aneuploidy), extra or missing portions of chromosomes (including deletions, duplications, supernumerary and marker chromosomes), or chromosomal rearrangements. The latter category includes translocations (transfer of a piece from one chromosome onto another chromosome), inversions (reversal in polarity of a chromosomal segment), insertions (transfer of a piece from one chromosome into another chromosome) and isochromosomes (chromosome arms derived from identical chromosomal segments). The abnormalities may be present only in a subset of cells (mosaicism), or in all cells. Inherited or constitutional abnormalities of various types occur with a frequency of about one in every 250 human births, with results which may be essentially benign, serious or even lethal. Chromosomal abnormalities are common and often diagnostic in acquired disorders such as leukemia and other cancers.

[0007] Hybridization probes have been developed in the past for chromosome analysis and diagnosis of abnormalities. The probes comprise cloned or amplified genomic sequences or cDNA. For example, U.S. Pat. Nos. 5,447,841, 5,663,319 and 5,756,696 describe hybridization probes in the form of labeled nucleic acids which are complementary to nucleic acid segments within target chromosomal DNA. However, these probes contain repetitive sequences and therefore must be used in conjunction with blocking nucleic acids which are substantially complementary to repetitive sequences in the labeled probes. That is, these prior art probes are either pre-reacted with the blocking nucleic acids so as to bind and block the repetitive sequences therein, or such blocking nucleic acids are present in the hybridization reaction mixture. If the repetitive sequences in the probes are not disabled in some manner, the probes will react with the multiple locations in the target chromosomal DNA where the repetitive sequences reside and will not specifically react with the single copy target sequences. This problem is particularly acute with interspersed repeat sequences which are widely scattered throughout the genome, but also is present with tandem repeats clustered or contiguous on the DNA molecule. The requirement for repeat sequence disabilization by using complementary blocking nucleic acids reduces the sensitivity of the existing probes. Reliable, easily detectable signals require DNA probes of from about 40-100 kb.

[0008] The prior art also teaches that cloned probes presumed to contain single copy sequences can be identified based on their lack of hybridization to radiolabeled total genomic DNA. In these other studies, hybridization is first performed with probes that contain pools of clones in which each recombinant DNA clone has been individually selected so that it hybridizes to single-copy sequences or very low copy repetitive sequences. A prerequisite step in this prior art is to identify single copy sequences by experimental hybridization of labeled genomic DNA to a candidate DNA probe by Southern or dot-blot hybridization. Positive hybridization with labeled total genomic DNA usually indicates that the candidate DNA probe contains a repetitive sequence and eliminates it from consideration as a single copy probe. Furthermore, an experimental hybridization of a DNA probe with total genomic DNA may fail to reveal the presence of multicopy repetitive sequences that are not abundant (<100 copies) or are infrequent in the genome. Such sequences represent a small fraction of the labeled genomic DNA and the signal they contribute will be below the limits of detection.

[0009] It has also been suggested to physically remove repeat sequences from probes by experimental procedures (Craig et al., Hum. Genet., 100:472-476 (1997); Durm et al., Biotech., 24:820-825 (1998)). This procedure involves prehybridizing a polymerase chain reaction (PCR)-amplified genomic probe with an excess of purified repetitive sequence DNA prior to applying the probe to the DNA target. The resulting purified probe is depleted of repetitive sequences. This procedure is in principle very similar to other procedures that disable the hybridization of repetitive sequences in probes, but the technique is time-consuming and does not provide any advantages over the probes described in U.S. Pat. Nos. 5,447,841 and 5,756,696.

### SUMMARY OF THE INVENTION

[0010] The present invention overcomes the problem outlined above and provides nucleic acid (e.g., DNA) hybridization probes comprising a labeled, single copy nucleic acid which hybridizes with a deduced single copy sequence interval in target nucleic acid of known sequence. Generally speaking, the probes of the invention are designed by comparing the sequence of a target nucleic acid with known repeat sequences in the genome of which the target is a part; with this information it is possible to deduce the single copy sequences within the target (i.e., those sequences which are essentially free of repeat sequences which, due to the lack of specificity, can mask the hybridization signal of the single copy sequences). As can be appreciated, these initial steps require knowledge of the sequences both of the target and genomic repeats, information which is increasingly available owing to the Human Genome Project and related bioinformatic studies. Furthermore, readily available computer software is used to derive the necessary single copy sequences.

[0011] The probes hereof are most preferably complementary to the target sequence, i.e., there is a 100% complementary match between the probe nucleotides and the target sequence. More broadly, less than 100% correspondence probes can be used, so long as the probes adequately hybridize to the target sequence, i.e., there should be at least about 80% sequence identity between the probe and a sequence which is a complement to target sequences, more preferably at least about 90% sequence identity.

[0012] Nucleic acid fragments corresponding to the deduced single copy sequences can be generated by a variety of methods, such as PCR amplification, restriction or exonuclease digestion of purified genomic fragments, or direct nucleic acid synthesis. The single copy fragments are then purified to remove any potentially contaminating repeat sequences, such as, for example, by electrophoresis or denaturing high pressure liquid chromatography; this is highly desirable because it eliminates spurious hybridization and detection of unrelated genomic sequences.

[0013] The probe fragments may then be cloned into a recombinant DNA vector or directly labeled. The probe is preferably labeled by nick translation using a modified or directly labeled nucleotide. The labeled probe is then denatured and hybridized, preferably to fixed chromosomal preparations on microscope slides or alternately to purified nucleic acid immobilized on a filter, slide, DNA chip, or other substrate. The probes can then be hybridized to chromosomes according to conventional fluorescence in situ hybridization (FISH) methods such as those described in U.S. Pat. No. 5,985,549 or 5,447,841; alternately, they can be hybridized to immobilized nucleic acids according to the techniques described in U.S. Pat. No. 5,110,920 or 5,273,881. Probe signals may be visualized by any of a variety of methods, such as those employing fluorescent, immunological or enzymatic detection reagents.

### BRIEF DESCRIPTION OF THE DRAWINGS

[0014] The patent or application file contains at least one drawing executed in color. Copies of this patent or patent application publication with color drawings will be provided by the Office upon request and payment of the necessary fee.

[0015] FIGS. 1-12 are respective CCD camera images of FISH experiments wherein various gene-specific digoxigenin-dUTP labeled probes were hybridized on metaphase cells and detected with rhodamine conjugated antibody to digoxigenin and where the chromosomes were counterstained with 4,6-diamidino-2-phenylindole (DAPI). Chromosomes with one or both chromatids hybridized are indicated by arrows whereas a star indicates the absence of normally expected hybridizations. In particular,

[0016] FIG. 1 illustrates hybridization results using the 5170 bp HIRA probe described in Example 1, and wherein the probe was reacted with purified repetitive DNA sequences;

[0017] FIG. 2 illustrates a comparative hybridization identical to that depicted in FIG. 1, using the same 5170 bp HIRA probe but without pre-reaction with purified repetitive DNA sequences;

[0018] FIG. 3 illustrates hybridization results using the 3544 bp 15q11-q13 probe pre-reacted with purified repetitive DNA;

[0019] FIG. 4 illustrates results in a comparative experiment using the 3544 bp 15q11-q13 probe without pre-reaction with purified repetitive DNA;

[0020] FIG. 5 illustrates hybridization results using the 4166 bp, 3544 bp and 2290 bp 15q11-q13 probes described in Example 2, without pre-reaction with purified repetitive DNA sequences;

[0021] FIG. 6 illustrates hybridization results using the 5170 bp, 3691 bp, 3344 bp and 2848 bp HIRA probes described in Example 1 without pre-reaction with purified repetitive DNA sequences;

[0022] FIG. 7 illustrates hybridization results using the 4823 bp 1p36.3 probe described in Example 2 on metaphase cells of a normal individual, with pre-reaction with purified repetitive DNA sequences;

[0023] FIG. 8 illustrates a comparative hybridization result using the 4823 bp 1p36.3 probe of FIG. 7 without pre-reaction with purified repetitive DNA sequences;

[0024] FIG. 9 illustrates hybridization results using the 4724 bp and 4823 bp 1p36.3 probes described in Example 2 with pre-reaction with purified repetitive DNA sequences, and wherein single copy hybridizations were observed on homologous pairs of chromosome 1s;

[0025] FIG. 10 illustrates a comparative hybridization result using the 4724 bp and 4823 bp 1p36.3 probes described in Example 2 without pre-reaction with purified repetitive DNA sequences, and depicting the same single copy hybridizations shown in FIG. 9;

[0026] FIG. 11 illustrates hybridization results using the 4166 bp, 3544 bp and 2290 bp 15q11-q13 probes described in Example 2 without pre-reaction with purified DNA sequences on metaphase cells of a patient affected with Prader-Willi syndrome and known to harbor a deletion of 15q11-q13 sequences for one chromosomal allele, with a star indicating lack of hybridization at the deleted chromosome position and with the arrow indicating hybridization to a single chromosome; and

[0027] FIG. 12 illustrates hybridization results using the 3691 bp, 3344 bp and 2848 bp HIRA probes described in Example 1 without pre-reaction with purified DNA sequences on metaphase cells of a patient affected with DiGeorge/Velo-Cardio-Facial Syndrome (VCFS) known to harbor a deletion of 22q11.2 sequences, wherein the star indicating lack of hybridization at the deleted chromosome position and the arrow indicating a normal homolog.

### DETAILED DESCRIPTION OF THE PREFERRED EMBODIMENT

[0028] The present invention is concerned with nucleic acid (e.g., DNA) hybridization probes useful for detection of genetic or neoplastic disorders. The probes are in the form of labeled nucleic acid fragments or a collection of labeled nucleic acid fragments whose hybridization to a target sequence can be detected. The invention also pertains to methods of developing, generating and labeling such probes, and to uses thereof.

[0029] The labeled probes hereof may be used with any nucleic acid target that may potentially contain repetitive sequences. These target sequences may include, but are not limited to chromosomal or purified nuclear DNA, heteronuclear RNA, or mRNA species that contain repetitive sequences as integral components of the transcript. In the ensuing detailed explanation, the usual case of a DNA target sequence and DNA probes is discussed; however, those skilled in the art will understand that the discussion is equally applicable (with art-recognized differences owing to the nature of the target sequences and probes) to other nucleic acid species.

[0030] An important characteristic of the probes of the invention is that they are composed of “single copy” or “unique” DNA sequences which are both complementary to at least a portion of the target DNA region of interest and are essentially free of sequences complementary to repeat sequences within the genome of which the target region is a part. Accordingly, a probe made up of a single copy or unique sequence is complementary to essentially only one sequence in the corresponding genome. As used herein, a “repeat sequence” is a sequence which repeatedly appears in the genome of which the target DNA is a part, with a sequence identity between repeats of at least about 60%, more preferably at least about 80%, and which is of sufficient length or has other qualities which would cause it to interfere with the desired specific hybridization of the probe to the target DNA, i.e., the probe would hybridize with multiple copies of the repeat sequence. Generally speaking, a repeat sequence appears at least about 10 times in the genome (more preferably at least about 50 times, and most preferably at least about 200 times) and has a length of at least about 50 nucleotides, and more preferably at least about 100 nucleotides. Repeat sequences can be of any variety, eg., tandem, interspersed, palindromic or shared repetitive sequences (with some copies in the target 30 region and some elsewhere in the genome), and can appear near the centromeres of chromosomes, distributed over a single chromosome, or throughout some or all chromosomes. Normally, with but few exceptions, repeat sequences do not express physiologically useful proteins.

[0031] Repetitive sequences occur in multiple copies in the haploid genome. The number of copies can range from two to hundreds of thousands, wherein the Alu family of repetitive DNA are exemplary of the latter numerous variety. The copies of a repeat may be clustered or interspersed throughout the genome. Repeats may be clustered in one or more locations in the genome, for example, repetitive sequences occurring near the centromeres of each chromosome, and variable number tandem repeats (VNTRs) Nakamura et al, Science, 23 5: 16 16 (1987); or the repeats may be distributed over a single chromosome for example, repeats found only on the X chromosome as described by Bardoni et al., Cytogenet. Cell Genet., 46: 575 (1987); or the repeats may be distributed over all the chromosomes, for example, the Alu family of repetitive sequences.

[0032] Simple repeats of low complexity can be found within genes but are more commonly found in non-coding genomic sequences. Such repeated elements consist of mono-, di-, ti-, tetra-, or penta-nucleotide core sequence elements arrayed in tandem units. Often the number of tandem units comprising these repeated sequences varies at the identical locations among genomes from different individuals. These repetitive elements can be found by searching for consecutive runs of the core sequence elements in genomic sequences.

[0033] As used herein, “sequence identity” refers to a relationship between two or more polynucleotide sequences, namely a reference sequence and a given sequence to be compared with the reference sequence. Sequence identity is determined by comparing the given sequence to the reference sequence after the sequences have been optimally aligned to produce the highest degree of sequence similarity, as determined by the match between strings of such sequences. Upon such alignment, sequence identity is ascertained on a position-by-position basis, e.g., the sequences are “identical” at a particular position if at that position, the nucleotides are identical. The total number of such position identities is then divided by the total number of nucleotides or residues in the reference sequence to give % sequence identity. Sequence identity can be readily calculated by known methods, including but not limited to, those described in Computational Molecular Biology, Lesk A. N., ed., Oxford University Press, New York (1988); Biocomputing: Informatics and Genome Projects, Smith D. W., ed., Academic Press, New York (1993); Computer Analysis of Sequence Data, Part I, Griffin A. M., and Griffin H. G., eds., Humana Press, New Jersey (1994); Sequence Analysis in Molecular Biology, von Heinge G., Academic Press (1987); Sequence Analysis Primer, Gribskov M. and Devereux J., eds., M. Stockton Press, New York (1991); and Carillo H., and Lipman D., SIAM J. Applied Math., 48:1073 (1988). Preferred methods to determine the sequence identity are designed to give the largest match between the sequences tested. Methods to determine sequence identity are codified in publicly available computer programs which determine sequence identity between given sequences. Examples of such programs include, but are not limited to, the GCG program package (Devereux et al., Nuc. Ac. Res., 12(1):387 (1984)), BLASTP, BLASTN and FASTA (Altschul et al., J. Molec. Biol., 215:403-410 (1990)). The BLASTX program is publicly available from NCBI and other sources (BLAST Manual, Altschul et al., NCBI, NLM, NIH, Bethesda, Md. 20894; Altschul et al., J. Molec. Biol., 215:403-410 (1990)). These programs optimally align sequences using default gap weights in order to produce the highest level of sequence identity between the given and reference sequences. As an illustration, by a polynucleotide having a nucleotide sequence having at least, for example, 95% “sequence identity” to a reference nucleotide sequence, it is intended that the nucleotide sequence of the given polynucleotide is identical to the reference sequence except that the given polynucleotide sequence may include up to 5 differences per each 100 nucleotides of the reference nucleotide sequence. In other words, in a polynucleotide having a nucleotide sequence having at least 95% identity relative to the reference nucleotide sequence, up to 5% of the nucleotides in the reference sequence may be deleted or substituted with another nucleotide, or a number of nucleotides up to 5% of the total nucleotides in the reference sequence may be inserted into the reference sequence. Inversions in either sequence are detected by these computer programs based on the similarity of the reference sequence to the antisense strand of the homologous test sequence. These variants of the reference sequence may occur at the 5′ or 3′ terminal positions of the reference nucleotide sequence or anywhere between those terminal positions, interspersed either individually among nucleotides in the reference sequence or in one or more contiguous groups within the reference sequence.

[0034] The single copy probes of the invention preferably should have a length of at least about 50 nucleotides, and more preferably at least about 100 nucleotides. Probes of this length are sufficient for Southern blot analyses. However, if other analyses such as FISH are employed, the probes should be somewhat longer, i.e., at least about 500 nucleotides, and more preferably at least about 2000 nucleotides in length. The probes can be used to detect virtually any type of chromosomal rearrangement, such as deletions, duplications, insertions, additions, inversions or translocations.

[0035] In order to develop probes in accordance with the invention, the sequence of the target DNA region must be known. The target region may be an entire chromosome or only portions thereof where rearrangements have been identified. With this sequence knowledge, the objective is to determine the boundaries of single copy or unique sequences within the target region. This is preferably accomplished by inference from the locations of repetitive sequences within the target region. Normally, the sequence of the target region is compared with known repeat sequences from the corresponding genome, using available computer software. Once the repeat sequences within the target region are identified, the intervening sequences are deduced to be single copy (i.e., the sequences between adjacent repeat sequences).

[0036] Optimal alignment of the target and repetitive sequences for comparison may be conducted by the local homology algorithm of Smith et al., Adv. Appl. Math., 2:482 (1981), by the homology alignment algorithm of Needleman et al., J. Mol. Biol., 48:443 (1970). The results obtained from the heuristic methods (Pearson et al., Proc. Natl. Acad. Sci., 85:244 (1988); Altschul et al., J. Molec. Biol., 215:403-410 (1990)) are generally not as comprehensive as the methods of Smith et al. (1981) and Needleman et al., (1970). However, they are faster than these methods.

[0037] Once the single copy sequence information is obtained, certain of the single copy sequences (normally the longest) are used to design hybridization probes. In this regard, probes may be of varying “complexity” as defined by Britten et al., Methods of Enzymol., 29:363 (1974) and as further explained by Cantor et al., Biophysical Chemistry: Part III: The Behavior of Biological Macromolecules, pp. 1228-1230. The complexity of selected probes is dependent upon the application for which it is designed. In general, the larger the target area, the more complex the probe. The complexity of a probe needed to detect a set of sequences will decrease as hybridization sensitivity increases. At high sensitivity and low background, smaller and less complex probes can be used.

[0038] With current hybridization techniques, it is possible to obtain reliable, easily detectable signals with relatively small probes in accordance with the invention. A readily detectable signal was obtained with a probe on the order of 2 kb in length, using FISH technology. This sensitivity of the present method is improved compared to the prior art (U.S. Pat. No. 5,756,696) because the probes of the present invention are homogeneous single copy sequences. However, smaller amplified segments, each comprising non-repetitive sequences, may also be used in combination as probes to achieve adequate signals for in situ hybridization. Complex single copy probes that hybridize to duplicated or triplicated targets can also increase hybridization signals.

[0039] One application of the use of multiple fragment probes is in the detection of translocations between different chromosomes. Proportionately increasing the complexity of the probe also permits analysis of multiple compact regions of the genome simultaneously. For a single chromosome, the portion of the probe targeted to one side of the breakpoint can be labeled and detected differently from that targeted to the other side of the breakpoint so that the derivative or translocated chromosome is detected by one label and is distinguishable from the intact normal chromosome which has both labels.

[0040] Once appropriate single copy sequences in the chromosomal region of interest have been identified, PCR is preferably used for amplifying the appropriate DNA to obtain probes. PCR is a well known technique for amplifying specific DNA segments in geometric progression and relies upon repeated cycles of DNA polymerase-catalyzed extension from a pair of oligonucleotide primers with homology to the 5′ end and to the complement of the 3′ end of the DNA segment to be amplified.

[0041] The nucleic acid (e.g., DNA) that serves as the PCR template may be single stranded or double stranded, but when the DNA is single stranded, it will typically be converted to double stranded. The length of the template DNA may be as short as 50 bp, but usually will be at least about 100 bp long, and more usually at least about 150 bp long, and may be as long as 10,000 bp or longer, but will usually not exceed 50,000 bp in length, and more usually will not exceed 20,000 bp in length. The DNA may be free in solution, flanked at one or both ends with non-template DNA, present in a cloning vector such as a plasmid and the like, with the only criteria being that the DNA be available for participation in the primer extension reaction. The template DNA may be derived from a variety of different sources, so long as it is complementary to the target chromosomal or immobilized DNA sequence. The amount of template DNA that is combined with the other reagents will range from about 1 molecule to 1 pmol, usually from about 50 molecules to 0.1 pmol, and more usually from about 0.01 pmol to 100 fmol. The oligonucleotide primers with which the template nucleic acid is contacted will be of sufficient length to provide for hybridization to complementary template DNA under annealing conditions but will be of insufficient length to form stable hybrids with template DNA under polymerization conditions. The primers will generally be at least about 10 nucleotides (nt) in length, usually at least 15 nt in length and more usually at least 16 nt in length and may be as long as 30 nt in length or longer, where the length of the primers will generally range from 18 to 50 nt in length, usually from about 20 to 35 nt in length. The yield of longer amplification products can be enhanced using primers of 30 to 35 nt and high fidelity polymerases (described in U.S. Pat. No. 5,436,149).

[0042] To maximize the signal intensity obtained during in situ hybridization, primer sequence pairs are preferred which, upon amplification, produce a DNA fragment that spans nearly the entire length of each single-copy genomic sequence interval. Hence, contiguous or closely spaced (software excludes pairs that are separated by ≦70% of the length of the single copy interval) primer pairs are generally excluded from consideration for producing probes for in situ hybridization. With the exception of cytogenetic preparations, this criterion is generally not applicable for probes that are hybridized to immobilized cloned or synthetic nucleic acid targets, since signal intensities of shorter probes are usually adequate due to the increased number of target molecules.

[0043] However, in order to optimize the yield and kinetics of the PCR reaction, the desired primer sequences are also subject to other criteria. First, a primer sequence should not be substantially self-complementary or complementary to the second primer. In particular, potential primer sequences are excluded which could result in the formation of stable hybrids involving the 3′ terminus of the primer and either another sequence in the same or the second primer (defined as ≧6 base pairs). Additionally, the Tₘ of one member of the primer pair should occur within 2° C. of its counterpart, which enables them to denature and anneal to the template nearly simultaneously. Software is well known in the art to identify primer sequences that satisfy all of the preferred criteria (see for example the Oligo 6 tour located on the Broad Institute website or at oligo.net).

[0044] The PCR reaction mixture will normally further comprise an aqueous buffer medium which includes a source of monovalent ions, a source of divalent cations and a buffering agent. Any convenient source of monovalent ions, such as KCl, K-acetate, NH₄-acetate, K-glutamate, NH₄ Cl, ammonium sulfate, and the like may be employed, where the amount of monovalent ion source present in the buffer will typically be present in an amount sufficient to provide for a conductivity in a range from about 500 to 20,000, usually from about 1000 to 10,000, and more usually from about 3,000 to 6,000 microohms. The divalent cation may be magnesium, manganese, zinc and the like, where the cation will typically be magnesium. Any convenient source of magnesium cation may be employed, including MgCl₂, Mg-acetate, and the like. The amount of Mg⁺²-present in the buffer may range from 0.5 to 10 mM, but will preferably range from about 2 to 4 mM, more preferably from about 2.25 to 2.75 mM and will ideally be at about 2.45 mM. Representative buffering agents or salts that may be present in the buffer include Tris, Tricine, HEPES, MOPS and the like, where the amount of buffering agent will typically range from about 5 to 150 mM, usually from about 10 to 100 mM, and more usually from about 20 to 50 mM, where in certain preferred embodiments the buffering agent will be present in an amount sufficient to provide a pH ranging from about 6.0 to 9.5, where most preferred is pH 7.3 at 72° C. Other agents which may be present in the buffer medium include chelating agents, such as EDTA, EGTA and the like.

[0045] Also present in the PCR reaction mixtures is a melting point reducing agent, i.e., a reagent that lowers the melting point of DNA. Suitable melting point reducing agents are those agents that interfere with the hydrogen bonding interaction of two nucleotides, where representative base pair destabilization agents include: betaine, formamide, urea, thiourea, acetamide, methylurea, glycinamide, and the like, where betaine is a preferred agent. The melting point reducing agent will typically be present in amounts ranging from about 20 to 500 mM, usually from about 50 to 200 mM and more usually from about 80 to 150 mM.

[0046] In preparing the PCR reaction mixture, the various constituent components may be combined in any convenient order. For example, the buffer may be combined with primer, polymerase and then template DNA, or all of the various constituent components may be combined at the same time to produce the reaction mixture.

[0047] Following preparation of the PCR reaction mixture, it is subjected to a plurality of reaction cycles, where each reaction cycle comprises: (1) a denaturation step, (2) an annealing step, and (3) a polymerization step. The number of reaction cycles will vary depending on the application being performed, but will usually be at least 15, more usually at least 20 and may be as high as 60 or higher, where the number of different cycles will typically range from about 20 to 40. For methods where more than about 25, usually more than about 30 cycles are performed, it may be convenient or desirable to introduce additional polymerase into the reaction mixture such that conditions suitable for enzymatic primer extension are maintained.

[0048] The denaturation step comprises heating the reaction mixture to an elevated temperature and maintaining the mixture at the elevated temperature for a period of time sufficient for any double stranded or hybridized nucleic acid present in the reaction mixture to dissociate. For denaturation, the temperature of the reaction mixture will usually be raised to, and maintained at, a temperature ranging from about 85 to 100° C. usually from about 90 to 98° C., and more usually from about 93 to 96° C. for a period of time ranging from about 3 to 120 seconds, usually from about 5 to 30 seconds.

[0049] Following denaturation, the PCR reaction mixture will be subjected to conditions sufficient for primer annealing to template DNA present in the mixture. The temperature to which the reaction mixture is lowered to achieve these conditions will usually be chosen to provide optimal efficiency and specificity, and will generally range from about 50 to 75° C., usually from about 55 to 70° C. and more usually from about 60 to 68° C. Annealing conditions will be maintained for a period of time ranging from about 15 seconds to 30 minutes, usually from about 30 seconds to 5 minutes.

[0050] Following annealing of primer to template DNA or during annealing of primer to template DNA, the reaction mixture will be subjected to conditions sufficient to provide for polymerization of nucleotides to the primer ends in manner such that the primer is extended in a 5′ to 3′ direction using the DNA to which it is hybridized as a template, i.e. conditions sufficient for enzymatic production of primer extension product. To achieve polymerization conditions, the temperature of the reaction mixture will typically be raised to or maintained at a temperature ranging from about 65 to 75° C., usually from about 67 to 73° C. and maintained for a period of time ranging from about 15 seconds to 20 minutes, usually from about 30 seconds to 5 minutes.

[0051] The above cycles of denaturation, annealing and polymerization may be performed using an automated device, typically known as a thermal cycler. Thermal cyclers that may be employed are described in U.S. Pat. Nos. 5,612,473; 5,602,756; 5,538,871; and 5,475,610.

[0052] In addition to the PCR, DNA fragments corresponding to unique sequences can also be obtained by a variety of other methods, including but not limited to deletion mutagenesis, restriction digestion, direct synthesis and DNA ligation.

[0053] If the genomic fragment is obtained by amplification or purification from DNA containing repetitive sequences, the fragment must then be purified prior to labeling and hybridization. Purification of homogeneously-sized DNA fragments can be accomplished by a variety of methods, including but not limited to electrophoresis and high pressure liquid chromatography. In the preferred method, amplified fragments are separated according to size by gel electrophoreses in Seakem LE Agarose using Tris Acetate buffer (Sambrook, Fritsch & Maniatis, Molecular Cloning: A Laboratory Manual [Cold Spring Harbor Laboratory Press, 1989]), stained with a dye such as ethidium bromide or Syber-Green, visualized with ultraviolet light (300 nm), excised from the gel using a scalpel. Each DNA fragment is then recovered from the gel fragment using a Micro-con 100 (Millipore, Watertown, Mass.) column by spin centrifugation.

[0054] Phenol-chloroform extraction of the amplified DNA is not an adequate method of purification. When this approach was tested, this purification technique resulted in nonspecific hybridization to all chromosomes along their entire length, which is consistent with the pattern produced by hybridization of repetitive sequences (data not shown). This occurs because, during the PCR process, DNA polymerase extends the replicated strand past the position of the second primer into adjacent repetitive sequences if the initial template contains genomic DNA sequences. These extension products which are longer than the amplification product, are present in all such PCR reactions. Since, in the present method, repetitive sequences are adjacent to the segments being amplified, the extension products are likely to contain such sequences. Phenol-chloroform extraction of PCR reactions does not remove such extension products. PCR reaction mixtures containing these sequences may hybridize to repetitive genomic DNA in addition to the target sequence. Hence, isolation of the purified genomic amplification fragment (whether it is obtained directly from genomic DNA or by PCR), is a preferred embodiment of the subject invention and would not be obvious to one skilled in the art.

[0055] Insertion of the purified fragments into plasmids, bacteriophages, or artificial chromosome cloning vehicles capable of being propagated in E. coli, yeast, or other species may be desirable to reduce the cost and labor required for repeated preparation of single copy DNA probes. A variety of cloning vectors have been optimized for rapid ligation and selection for vectors containing PCR products (for example: U.S. Pat. Nos. 5,487,993 and 5,766,891). If the probe will be used in multiple hybridizations, then the cloned recombinant form will be less expensive to produce in large quantities than by iterative PCR amplification from the same genomic DNA template. In addition, genomic insert in the cloned probe does not have to be isolated during purification, since the fragment recombined with vector is propagated in the absence of any other genomic DNA that could potentially contain repetitive sequences. Finally, the cloned vehicle provides a potentially inexhaustible source of probe, whereas natural genomic DNA templates may have to be reisolated from cell lines or from other sources. Single copy DNA fragments obtained by PCR amplification as described above are isolated according to size by gel electrophoresis and purified by columns as is well known in the art.

[0056] These fragments are then labeled with nonisotopic identifying label such as a fluorophore, an enzymatic conjugate, or one selected from the group consisting of biotin or other moieties recognized by avidin, streptavidin, or specific antibodies. There are several types of non-isotopic identifying labels. One type is a label which is chemically bound to the probe and serves as the means for identification and localization directly. An example of this type would be a fluorochrome moiety which upon application of radiation of proper wavelengths will become excited into a high energy state and emit fluorescent light. The probes can be synthesized chemically or preferably be prepared using the methods of nick-translation (Rigby et al., J. Mol. Biol., 113:237-251, (1977)) or Klenow labeling (Feinberg et al., Anal. Biochem., 137:266-267, (1984)) in the conventional manner using a reactant comprising the identifying label of choice (but not limited to) conjugated to a nucleotide such as dATP or dUTP. The fragments are either directly labeled with a fluorophore-tagged nucleotide or indirectly labeled by binding the labeled duplex to a fluorescently-labeled antibody that recognizes the modified nucleotide that is incorporated into the fragment as described below. Nick-translations (100 μl reaction) utilize endonuclease-free DNA polymerase I (Roche Molecular Biochemicals, Indianapolis, Ind.) and DNase I (Worthington Biochemical Corporation, Lakewood, N.J.). Each fragment is combined with DNA polymerase (20 units/microgram DNA), DNase I (10 microgram/100 μl reaction), labeled nucleotide (0.05 mm final) and nick translation buffer. The reaction is performed at 15° C. for 45 minutes to 2 hours and yields a variety of labeled probe fragments of different nucleotide sizes in the 100 to 500 bp size range.

[0057] Other methods for labeling and detecting probes in common use may be applied to the single-copy DNA probes produced by the present method. These include: fluorochrome labels (which resolve labeling on individual chromatids which serves as an affirmation that hybridization occurred unequivocably, and further allows detection precisely at site of hybridization rather than at some distance away), chemical reagents which yields an identifiable change when combined with the proper reactants (for example, alkaline phosphatase, horseradish peroxidase and galactosidase, each of which reacts and provide a detectable color change that identifies the presence and position of the target sequence), and indirect linkage mechanism of specifically binding entities (such as the biotin-avidin system in which the probe is preferably joined to biotin by conventional methods and added to an avidin- or streptavidin-conjugated fluorochrome or enzyme which provides the specificity for attaching the fluorochrome or enzyme to the probe).

[0058] It will be recognized that other identifying labels may also be used with the described probes. These include fluorescent compositions such as energy transfer groups, conjugated proteins, antibodies and antigens, or radioactive isotopes.

[0059] Chromosomal hybridization and detection are a preferred use of DNA probes generated by the present invention. DNA probes generated by the present method may be hybridized either directly to complementary nucleic acids in cells (in situ hybridization) or to nucleic acids immobilized on a substrate. A preferred use of the method is in situ hybridization, which is well known in the art, being described in U.S. Pat. Nos. 5,985,549; 5,447,841; 5,756,696; 5,869,237. Based on early work of Gall and Pardue (Proc. Natl. Acad. Sci., 63:378-383, 1969), isotopic in situ hybridization was established in the 1970s (see Gerhard et al., Proc. Natl. Acad. Sci., 78:3755-3759, 1981 and Harper et al., Proc. Natl. Acad. Sci., 78:4458-4460, 1981 as examples) and subsequently nonisotopic in situ hybridization was established. The technique of nonisotopic in situ hybridization is reviewed and a protocol is provided for use in chromosomal hybridization by Knoll and Lichter, in Current Protocols in Human Genetics, Vol. 1, Unit 4.3 (Green-Wiley, New York, 1994) and in U.S. Pat. No. 5,985,549. The technique relies on the formation of duplex nucleic acid species, in which one strand is derived from a labeled probe molecule and the second strand comprises the target to be detected. Target molecules may comprise chromosomes or cellular nucleic acids. Numerous methods have been developed to label the probe and visualize the duplex.

[0060] The present method is intended to be used with any nucleic acid target containing repetitive sequences. The sample containing the target nucleic acid sequence can be prepared from cellular nuclei, morphologically intact cells (or tissues), chromosomes, other cellular material components, or synthetically produced nucleic acids. The samples may be obtained from the fluids or tissues of a mammal, preferably human, which are suspected of being afflicted with a disease or disorder either from a biopsy or post-mortem, or from plants.

[0061] As an example, chromosomal preparations can be made in the following manner: phytohemagglutinin-stimulated peripheral lymphocytes are cultured in RPMI 1640 medium containing 10% fetal calf serum for 72 hours at 37° C. Ethidium bromide (100 ug/10 ml final) is added 1½ hours prior to harvest. Colcemid (1 ug/10 ml final) is added during the final 20 min of incubation with ethidium bromide. The cells are then pelleted by centrifugation and incubated preferably in 0.075 M KCl at 37° C. for about 20 minutes. Cells are then pelleted again and fixed in 3 changes of Carnoy's fixative (3:1 methanol:acetic acid volumetric ratio) using conventional cytogenetic techniques. [For a review of chromosome preparation from peripheral blood cells, see Bangs and Donlon in Dracopoli et al., eds., Current Protocols in Human Genetics, Vol. 1, Unit 4.1 (Green-Wiley, New York, 1994)]. The nuclei or cells in suspension can then be dropped onto clear glass coverslips or microscope slides in a humid environment to promote chromosome spreading. The coverslips or microscope slides can then be preferentially air dried overnight, aged or stored until required for use in in situ hybridization.

[0062] Immediately prior to chromosomal denaturation in the in situ hybridization procedure, the dried or stored chromosome preparations can be pretreated in prewarmed 2×SSC (components are in Sambrook, Fritsch & Maniatis, Molecular Cloning: A Laboratory Manual [Cold Spring Harbor Laboratory Press, 1989]) for 30 minutes at 37° C. followed by dehydration in an ethanol series (2 minutes each in 70%, 80%, 90% and 100% ethanol).

[0063] When the target nucleic acid sequence is DNA, DNA in the sample can be denatured by heat or alkali. [See Harper et al., Proc. Natl. Acad. Sci., 78:4458-60 (1981), for alkali denaturation and Gall et al., Proc. Natl. Acad. Sci., 63:370-383 (1969)]. Denaturation is carried out so that the DNA strands are separated with minimal shearing, degradation or oxidation.

[0064] In the preferred current method, the labeled single copy probe is resuspended in deionized formamide and denatured at 70-75° C. The chromosomal template is denatured in a solution containing 70% formamide/2×SSC, pH 7.0 followed by dehydration in an ethanol series (2 minutes each in cold 70% ethanol and room temperature 80, 90 and 100% ethanol). Hybridization of the labeled probe to the corresponding template is carried out in a solution containing 50% formamide/2×SSC/10% dextran sulfate/BSA [bovine serum albumin; 1 mg/ml final] for a few hours to overnight. The length of time depending on the complexity of the probe that is utilized. After hybridization, non-hybridizing excess probe is removed by a washing procedure. The duplexes are treated with a series of 15-30 minute washes: first with a solution of 50% formamide/2×SSC at 39-45° C., then 2×SSC at 39-45° C., followed by a 15-30 minute wash at room temperature in 1×SSC. The hybridized sequences are detected by relevant means. For example, digoxigenin-dUTP can be but is not limited to detection by an antibody to digoxigenin such as rhodamine or fluorescein conjugated antibody (Roche Molecular Biochemicals, Indianapolis, Ind.). Following detection, spurious detection reagents are removed by washing in varying SSC and SSC/triton-X concentrations, the chromosomes are counterstained with a dye such as DAPI and the hybridized preparation is mounted in an antifade solution such as Vectashield (Vector Laboratories, Burlingame, Calif.). The cells are examined by fluorescence microscopy with the appropriate filter sets and imaged with a charge coupled device (CCD).

[0065] An important aspect of the present invention is that the probe or target DNA does not require pre-reaction with a non-specific nucleic acid competitor such as purified repetitive DNA or that the probe does not require experimental verification that the single copy fragments or recombinant cloned probes do not contain repetitive sequences (U.S. Pat. Nos. 5,985,549; 5,447,841; 5,663,319; 5,756,696) because the probes are single copies without repetitive elements. This results in a significantly improved signal to noise ratio. A signal to noise ratio is defined as a ratio of the probability of the probe detecting a bona fide signal of hybridization of the target nucleic acid sequence to that of the probability of detecting the background caused by non-specific binding of the labeled probe.

[0066] The hybridization reactions carried out using the probes of the invention are themselves essentially conventional. As indicated, two exemplary types of hybridizations are the Southern blot and FISH techniques, well known to those skilled in the art. However, the visual patterns resulting from use of the probes, termed indicator patterns, are extremely useful tools for cytogenetic analyses, especially molecular cytogenetic analyses. These indicator patterns facilitate microscopic and/or flow cytometric identification of normal and abnormal chromosomes and characterization of the genetic abnormalities. Since multiple compatible methods of probe visualization are available, the binding patterns of different components of the probes can be distinguished, for example, by color. Thus, the invention is capable of producing virtually any desired indicator pattern on the chromosomes visualized with one or more colors (a multi-color indicator pattern) and/or other indicator methods.

[0067] Preferred indicator patterns derived from using the probes of the invention comprise one or more “bands,” meaning a reference point in a genome comprising a target DNA sequence with a probe bound thereto, and wherein the resulting duplex is detectable by some indicator. Depending on hybridization washes and the detection conditions, a band can extend from the narrow context of a sequence providing a reliable signal to a single chromosome region to multiple regions on single or plural chromosomes. The indicator bands from the probes hereof are to be distinguished from bands produced by pretreatment and chemical staining. The probe-produced bands of the present invention are based upon the complementarity of the DNA sequences, whereas bands produced by chemical staining depend upon natural characteristics of the chromosomes (such as structure or protein composition), but not by hybridization to the DNA sequences thereof. Furthermore, chemical staining techniques are useful only in connection with metaphase chromosomes, whereas the probe-produced bands of the present invention are useful for both metaphase and interphase chromosomes.

[0068] The following examples set forth the preferred techniques employed for the development, generation, labeling and use of specific DNA probes designed to hybridize to a target DNA sequence in a genome. It is to be understood, however, that these examples are provided by way of illustration and nothing therein should be taken as a limitation upon the overall scope of the invention.

### Example 1

### Development of HIRA Gene Probe

[0069] A known genetic disorder on human chromosome 22 involves a deletion of one HIRA gene in chromosome band 22q11.2, i.e., in normal individuals; there are two copies of the HIRA gene, whereas in affected individuals, only one copy is present. This deletion is considered to be a cause of haploinsufficiency syndromes such as DiGeorge and Velo-Cardio-Facial Syndromes (VCFS), because insufficient amounts of gene product(s) may disrupt normal embryonic development (Fibison et al., Amer. J. Hum. Genet., 46:888-95 (1990); Consevage et al., Amer. J. Cardiol., 77:1023-1205 (1996)). Other syndromes including Cat Eye Syndrome and derivative chromosome 22 syndrome result from an excess of genomic sequences from this region (Mears et al., Amer. J. Hum. Genet., 55:134-142 (1994); Knoll et al., Amer. J. Med. Genet., 55:221-224 (1995)). Typically individuals with these syndromes have supernumerary derivative chromosome 22s.

[0070] Initially, a computer-based search using the search term “HIRA” was performed using Entrez Nucleotide software at the National Library of Medicine website. This identified a series of cDNA sequences for the HIRA gene in GenBank. The full length cDNA sequence was selected (GenBank Accession No. X81844), having 3859 bp. This cDNA sequence was then compared with the genome sequence which included draft sequences at the National Library of Medicine (which can be found on the website for National Center for Biotechnological Information located at ncbi.nlm.nih.gov). This was done in order to determine whether genomic sequences of sufficient length were available for probe development. This comparison confirmed that the entire HIRA genomic sequence was known, and that the coding sequence interval spanned a length of 100,836 bp in the chromosome. Since the available contiguous genomic sequence in GenBank exceeded the length of the coding interval, it was possible to select an interval longer than the coding region in order to include sequences from the gene promoter at the 5′ end and untranslated sequences and polyadenylation signal at the 3′ end. A total genomic interval of approximately 103 kb was thus selected. Position 1 of this ˜103 kb interval corresponds to position 798,334 in GenBank Accession number NT_{—}001039.

[0071] In the next step, the selected 103 kb genomic interval was compared with known high-complexity repeat sequence family members or consensus sequences that are aligned with the test genomic sequences (SEQ ID Nos. 1-428) and all combinations of low-complexity tandem repeat sequences of at least 17 nucleotides in length (mono-, di-, tri-, and tetranucleotide units) known to be present in the human genome (SEQ ID Nos. 447-479). This comparison was done using the publicly available CENSOR program which can be found at the Genetic Information Research Institute website, www.girinst.org. This program utilizes the Smith-Waterman global alignment comparison algorithm to determine the locations and distribution of repeat sequences within the genomic interval. A Smith-Waterman alignment of repetitive with genomic sequences was performed with the following parameters: Length of margin sequence: 50 nt, minimum length to extract insertion: 12 nt, minimum margin to combine matching fragments: 30, similarity threshold: 22, similarity threshold to always keep match: 35, ratio threshold: 2.8, relative similarity threshold: 2.8, gap constant D1: 2.95, gap constant D2: 1.90, and mismatch penalty: −1.0. This analysis generated the following table, which details the coordinates of repetitive sequence family members found in and adjacent to the human HIRA gene coding sequence.

TABLE 1

| | | | | Position (bp) | |
|---|---|---|---|---|---|
| | | | | in Seq. Listing | |
| HIRA position | | | | Corresponding to | |
| (bp) | | | | HIRA Match | |
| Begin | End | Repeat Family | SEQ ID NO. | Begin | End |
| 798411 | 798434 | (AC) | 452 | 1 | 24 |
| 798983 | 799395 | MLT2A1 | 444 | 1 | 434 |
| 801257 | 801348 | CHESHIRE_A | 420 | 132 | 223 |
| 801367 | 801729 | L1ME_ORF2 | 425 | 757 | 1089 |
| 801746 | 802032 | Alu-Jb | 2 | 2 | 289 |
| 802033 | 802308 | L1ME_ORF2 | 425 | 1090 | 1380 |
| 802355 | 802434 | L1MB6_5 | 77 | 1629 | 1710 |
| 802448 | 802798 | L1M3D_5 | 66 | 996 | 1348 |
| 802811 | 803100 | Alu-Y | 2 | 1 | 290 |
| 803104 | 803189 | L1M3D_5 | 66 | 907 | 995 |
| 803199 | 803454 | Alu-Jb | 2 | 5 | 290 |
| 803472 | 803545 | Alu-Spqxz | 2 | 2 | 76 |
| 803548 | 804061 | L1MEC_5 | 345 | 1860 | 2392 |
| 804079 | 804365 | Alu-Sz | 2 | 6 | 290 |
| 804476 | 804559 | L1P_MA2 | 348 | 6242 | 6321 |
| 804625 | 804885 | L1ME_ORF2 | 425 | 2287 | 2568 |
| 804936 | 804997 | MLT1E2 | 106 | 198 | 260 |
| 805011 | 805077 | MLT1E1 | 105 | 420 | 484 |
| 805110 | 805211 | L1PBA_5 | 359 | 103 | 204 |
| 805212 | 805862 | L1PBA_5 | 359 | 1089 | 1738 |
| 805933 | 805989 | Alu-J | 2 | 234 | 290 |
| 805991 | 806489 | L1PBA_5 | 359 | 1749 | 2247 |
| 806510 | 806624 | L1 | 59 | 1659 | 1773 |
| 806628 | 806917 | Alu-Sz | 2 | 1 | 290 |
| 806919 | 807254 | L1M2_5 | 61 | 2377 | 2716 |
| 807301 | 808176 | L1P_MA2 | 348 | 3516 | 4425 |
| 808179 | 808469 | Alu-Sz | 2 | 1 | 290 |
| 808476 | 808734 | L1 | 59 | 3268 | 3525 |
| 808735 | 809426 | L1ME_ORF2 | 425 | 1411 | 2105 |
| 809429 | 809860 | L1P_MA2 | 348 | 5607 | 6044 |
| 809861 | 809993 | Alu-Jb | 2 | 2 | 134 |
| 809996 | 810282 | Alu-Jb | 2 | 2 | 290 |
| 810345 | 811040 | L1 | 59 | 4711 | 5402 |
| 811041 | 811221 | L1PB3 | 358 | 151 | 333 |
| 811226 | 811513 | Alu-Sx | 2 | 1 | 287 |
| 811515 | 812032 | L1PB1 | 357 | 330 | 863 |
| 812096 | 812394 | Alu-Jb | 2 | 1 | 288 |
| 812474 | 812698 | Alu-Jb | 2 | 5 | 229 |
| 812721 | 812836 | Alu-Jo | 2 | 2 | 117 |
| 812862 | 812901 | L1P_MA2 | 348 | 4315 | 4354 |
| 812903 | 813078 | L1 | 59 | 3028 | 3222 |
| 813079 | 814102 | L1ME_ORF2 | 425 | 1113 | 2166 |
| 814323 | 814410 | MER1B | 315 | 242 | 337 |
| 814411 | 814557 | CHARLIE3 | 7 | 1 | 281 |
| 814780 | 814916 | L1MB7 | 78 | 9 | 143 |
| 815061 | 815181 | Alu-Y | 2 | 1 | 134 |
| 815420 | 815452 | LTR67 | 279 | 99 | 131 |
| 816487 | 816772 | Alu-Sx | 2 | 5 | 290 |
| 817180 | 817270 | L1MCC_5 | 335 | 1384 | 1473 |
| 817332 | 817620 | Alu-Sg | 2 | 1 | 290 |
| 817634 | 817909 | Alu-Sq | 2 | 1 | 288 |
| 817943 | 818227 | Alu-Sx | 2 | 2 | 289 |
| 818368 | 818578 | HAL1 | 18 | 1346 | 1547 |
| 818631 | 818791 | LINE2 | 362 | 2280 | 2464 |
| 818824 | 818889 | Alu-S | 2 | 223 | 290 |
| 818890 | 819185 | LINE2 | 362 | 2465 | 2749 |
| 819328 | 819450 | LINE2 | 362 | 1925 | 2049 |
| 819565 | 819757 | LINE2 | 362 | 2273 | 2498 |
| 823604 | 823892 | Alu-Jo | 2 | 2 | 290 |
| 826836 | 827042 | Alu-Sxzg | 2 | 84 | 290 |
| 827922 | 827977 | MIR | 99 | 105 | 160 |
| 830762 | 831371 | L1MEC_5 | 345 | 1498 | 2123 |
| 831396 | 831685 | Alu-Sx | 2 | 2 | 290 |
| 831687 | 831774 | L1MEC_5 | 345 | 2117 | 2205 |
| 831778 | 832066 | Alu-Sx | 2 | 1 | 290 |
| 832155 | 832288 | Alu-FLA | 2 | 5 | 134 |
| 832317 | 832431 | L1MC2 | 79 | 666 | 786 |
| 832442 | 832735 | Alu-Sz | 2 | 1 | 289 |
| 832742 | 832992 | L1MC2 | 79 | 787 | 1077 |
| 833004 | 833170 | L1ME_ORF2 | 425 | 172 | 340 |
| 833177 | 834590 | TIGGER1 | 148 | 1 | 1477 |
| 834592 | 834642 | Alu-Jb | 2 | 156 | 207 |
| 834799 | 834877 | Alu-Jb | 2 | 208 | 290 |
| 834907 | 835194 | Alu-Y | 2 | 1 | 289 |
| 835198 | 835590 | TIGGER1 | 148 | 1468 | 1900 |
| 835597 | 835888 | Alu-Sx | 2 | 1 | 290 |
| 835946 | 835979 | L1P_MA2 | 348 | 4654 | 4689 |
| 836060 | 836177 | MER2 | 316 | 229 | 345 |
| 836203 | 836486 | Alu-Sx | 2 | 7 | 290 |
| 836497 | 836712 | MER2 | 316 | 1 | 228 |
| 838478 | 838760 | Alu-Sz | 2 | 1 | 288 |
| 838822 | 839069 | Alu-Sx | 2 | 1 | 288 |
| 839086 | 839373 | Alu-Sz | 2 | 1 | 289 |
| 840297 | 840926 | L1MB7 | 78 | 269 | 915 |
| 841062 | 841306 | L1MB7 | 78 | 7 | 249 |
| 841323 | 841382 | L1ME_ORF2 | 425 | 3053 | 3116 |
| 841408 | 841697 | Alu-Sq | 2 | 1 | 290 |
| 841705 | 841828 | Alu-Jo | 2 | 1 | 136 |
| 841829 | 842012 | L1ME_ORF2 | 425 | 2870 | 3052 |
| 842744 | 842871 | MER86 | 239 | 51 | 183 |
| 842879 | 843107 | Alu-Spqxz | 2 | 3 | 230 |
| 843109 | 843271 | Alu-Jo | 2 | 9 | 175 |
| 847056 | 847210 | MER104 | 293 | 1 | 179 |
| 847256 | 847351 | L1ME4 | 343 | 128 | 224 |
| 847413 | 847551 | MIR | 99 | 65 | 218 |
| 847570 | 847695 | L1ME4 | 343 | 1 | 127 |
| 847865 | 848137 | Alu-Y | 2 | 1 | 290 |
| 848171 | 848458 | Alu-Sg | 2 | 1 | 290 |
| 848493 | 848564 | L1PA7 | 355 | 35 | 105 |
| 848646 | 848928 | Alu-Sc | 2 | 5 | 290 |
| 849186 | 849435 | L1ME_ORF2 | 425 | 2527 | 2796 |
| 849450 | 849745 | Alu-Sx | 2 | 5 | 289 |
| 850114 | 850249 | L1P_MA2 | 348 | 5447 | 5610 |
| 850250 | 850761 | L1 | 59 | 3478 | 4017 |
| 850824 | 850942 | L1ME_ORF2 | 425 | 1128 | 1265 |
| 851588 | 851614 | (T) | 449 | 1 | 27 |
| | | | (complement) | | |
| 851749 | 851881 | L1ME2 | 341 | 357 | 523 |
| 852607 | 852853 | L1MA10 | 72 | 664 | 918 |
| 852863 | 853156 | Alu-Sc | 2 | 1 | 290 |
| 853176 | 853211 | L1MA10 | 72 | 628 | 663 |
| 853212 | 853267 | L1MA9 | 75 | 987 | 1041 |
| 853491 | 853779 | Alu-Sz | 2 | 1 | 290 |
| 859137 | 859435 | Alu-Sx | 2 | 1 | 290 |
| 859436 | 859456 | (A) | 449 | 1 | 21 |
| 859570 | 859805 | L1ME3A | 342 | 215 | 442 |
| 859806 | 860289 | L1ME2 | 341 | 375 | 879 |
| 860318 | 860605 | Alu-Y | 2 | 1 | 290 |
| 862194 | 862481 | Alu-Sg | 2 | 1 | 290 |
| 865060 | 865350 | Alu-Sq | 2 | 1 | 290 |
| 867521 | 867800 | Alu-Jb | 2 | 1 | 288 |
| 867836 | 867876 | MIR | 99 | 157 | 196 |
| 869546 | 869802 | LINE2 | 362 | 123 | 413 |
| 869923 | 870118 | LINE2 | 362 | 1251 | 1450 |
| 870124 | 870202 | Alu-J | 2 | 48 | 132 |
| 870203 | 870296 | LINE2 | 362 | 1451 | 1592 |
| 870316 | 870666 | LINE2 | 362 | 1708 | 2097 |
| 871000 | 871075 | LINE2 | 362 | 2617 | 2736 |
| 871650 | 871935 | Alu-Jo | 2 | 1 | 290 |
| 871936 | 871960 | (GAAAAA) | | 4 | 28 |
| 872154 | 872444 | Alu-Sc | 2 | 1 | 289 |
| 874867 | 874990 | L1MB7 | 78 | 529 | 676 |
| 878120 | 878408 | Alu-Sx | 2 | 1 | 290 |
| 881003 | 881054 | MLT1G | 109 | 217 | 268 |
| 881130 | 881266 | MLT1G | 109 | 269 | 480 |
| 881293 | 881346 | MLT1G | 109 | 415 | 469 |
| 881762 | 881891 | LINE2B | 363 | 85 | 229 |
| 882448 | 882740 | Alu-Sb0 | 2 | 1 | 290 |
| 883566 | 883716 | Alu-Sz | 2 | 1 | 288 |
| 883782 | 883977 | Alu-Sc | 2 | 2 | 290 |
| 883988 | 884329 | L1P_MA2 | 348 | 5600 | 5935 |
| 884333 | 884623 | Alu-Sp | 2 | 1 | 290 |
| 884624 | 885134 | L1ME_ORF2 | 425 | 2431 | 2975 |
| 885160 | 885456 | Alu-Jb | 2 | 9 | 290 |
| 885460 | 885742 | L1ME_ORF2 | 425 | 2949 | 3252 |
| 885744 | 886031 | Alu-Sx | 2 | 1 | 288 |
| 886032 | 886082 | Alu-Sp | 2 | 291 | 341 |
| 886083 | 886166 | L1MB7 | 78 | 137 | 220 |
| 886168 | 886454 | Alu-Sc | 2 | 1 | 290 |
| 886535 | 887059 | L1MB7 | 78 | 345 | 901 |
| 887169 | 887460 | Alu-Y | 2 | 1 | 289 |
| 887485 | 887748 | L1MD2 | 337 | 794 | 1072 |
| 887752 | 887779 | LOR1I | 366 | 395 | 422 |
| 888253 | 888318 | LINE2 | 362 | 2440 | 2505 |
| 888385 | 888548 | LINE2 | 362 | 2579 | 2739 |
| 888865 | 888893 | LOR1I | 366 | 394 | 422 |
| 889006 | 889296 | Alu-Jb | 2 | 5 | 290 |
| 889446 | 889548 | Alu-Jo | 2 | 188 | 290 |
| 889549 | 889677 | L1PB3 | 358 | 770 | 897 |
| 889842 | 890133 | Alu-Sq | 2 | 1 | 290 |
| 890515 | 890797 | Alu-Sz | 2 | 1 | 283 |
| 890858 | 890972 | L1ME2 | 341 | 769 | 885 |
| 890986 | 891024 | LOR1I | 366 | 396 | 434 |
| 891028 | 891063 | LTR66 | 266 | 173 | 207 |
| 891126 | 891536 | LINE2 | 362 | 1980 | 2452 |
| 891545 | 891670 | LTR16A1 | 382 | 9 | 128 |
| 891688 | 891963 | LTR16A | 381 | 146 | 429 |
| 892907 | 893013 | LINE2 | 362 | 2636 | 2747 |
| 893851 | 893924 | MLT1L | 119 | 47 | 119 |
| 894528 | 894849 | Alu-Sx | 2 | 1 | 290 |
| 895825 | 895903 | LINE2 | 362 | 2592 | 2664 |
| 895912 | 896083 | MER20 | 317 | 46 | 216 |
| 897067 | 897299 | MER20 | 317 | 2 | 217 |
| 897492 | 897624 | Alu-FLA | 2 | 2 | 136 |
| 897977 | 898261 | Alu-Sc | 2 | 1 | 290 |

[0072] The lengths of the non-repetitive intervals were calculated from these data. For example, a non-repetitive interval of 5358 bp was determined between coordinate positions 853779 and which delineate the boundaries of adjacent Alu-Sz and Alu-Sx repetitive elements. Next, the non-repetitive intervals were sorted based on their respective lengths. Four of these non-repetitive intervals were selected for probe development, namely the above-referenced 5358 bp sequence, a 3847 bp sequence (coordinates 819757 and 823604), a 3785 bp sequence (coordinates 843271 and 847056), and a 3130 bp sequence (coordinates 874990 and 878120).

[0073] In the next step, the long PCR technique was used to amplify portions of the four identified single copy intervals. The technique followed for amplification of the 5358 bp interval is described in detail below. Similar techniques were followed for amplification of the remaining three single copy intervals.

[0074] Probes of maximal length were desired for FISH experiments. However, in order to optimize the PCR reaction that generated these probes, other constraints had to be met, which resulted in amplification products somewhat shorter than the entire non-repetitive sequence interval. The Prime computer program was employed to optimize the selection of primers for PCR (Genetics Computer Group software package, Madison Wis.). The PCR primers which were optimized for long PCR were constrained as follows: size of 30-35 nucleotides; GC content of 50-80%; melting temperature of 65-70° C.; the primer was not permitted to self-anneal at the 3′ end with hairpins of greater than 8 nucleotides; the primer was not permitted to self-anneal at any position with greater than 14; and the primer was permitted to anneal only at a single position in the target sequence and primer-primer annealing was limited at the 3′ end to less than 8 bp and at any other point less than 14 bp. In addition, certain constraints were applied to the amplified PCR product in order to optimize long PCR: length of 5100-5358 nucleotides; GC content of 40-60%; melting temperature of 70-95° C.; difference in forward and reverse primer melting points less than 2° C. This yielded a possible 517 forward primers and 382 reverse primers, and a total of 928 possible products. The Prime program using the foregoing constraints rank ordered potential primer pairs. The top ranked primers were selected for synthesis, as set forth in the following Table 2. These primers were commercially produced (Oligos, Etc., Wilsonville, Oreg.).

TABLE 2

| | | | Coordinates | Forward | | | |
|---|---|---|---|---|---|---|---|
| | | GenBank Accession | of Longest | PCR Primer | Reverse PCR Primer | PCR Primer SEQ ID | Probe |
| | Chromosome | No., Chromosome | Single Copy Intervals, | Coordinates, | Coordinates, | Nos., | Length |
| Gene | Band | Genomic Sequence | Beginning/End | Beginning/End | Beginning/End | Forward/Reverse | (bp) |
| HIRA | 22q11.2 | NT_001039 | 853779/859137 | 853946/853975 | 859116/859085 | 429/430 | 5170 |
| HIRA | 22q11.2 | NT_001039 | 819757/823604 | 819901/819933 | 823592/823559 | 431/432 | 3691 |
| HIRA | 22q11.2 | NT_001039 | 843271/847056 | 843602/843631 | 846946/846915 | 433/434 | 3344 |
| HIRA | 22q11.2 | NT_001039 | 874990/878120 | 875226/875257 | 878074/878042 | 435/436 | 2848 |

[0075] Using these primers, a long PCR reaction (50 μl) was performed using 1 microgram of high molecular weight genomic DNA (purified by phenol extraction) and 200 μM of each oligonucleotide primer to amplify the 5170 bp probe. Specifically, high fidelity DNA polymerase (LA-Taq, Takara Chemical Co.) was employed using the following thermal cycling protocol:

[0076] Step 1—94° C.—5 minutes

[0077] Step 2—98° C.—20 seconds

[0078] Step 3—65° C.—7 minutes

[0079] Step 4—14 times to Step 2

[0080] Step 5—98° C.—20 seconds

[0081] Step 6—65° C.—7 minutes+15 s/cycle

[0082] Step 7—14 times to Step 5

[0083] Step 8—72° C.—10 minutes

[0084] Step 9—0° C.

[0085] Step 10—END

[0086] Because amplification of the 5170 bp probe is less efficient than amplification of shorter fragments, the initial PCR reaction did not yield sufficient quantities of probe for multiple hybridization experiments. Therefore, a 4 μl aliquot of the original DNA amplification reaction was reamplified using the following protocol: Step 1—94° C.—1.5 minutes, followed by Steps 2-10 of the original PCR reaction. Sufficient quantities of the 5170 bp probe were obtained. An alternative to reamplification is to increase Step 7 by at least 10 cycles.

[0087] The amplified product was then purified by gel electrophoresis followed by column chromatography. First, the amplified product was separated on a 0.8% Seakem LE agarose gel (FC Bioproducts) in 1× modified TAE buffer. The gel was then stained with ethidium bromide and visualized with UV light. The fragment corresponding to the correct interval size was excised in an Ultrafree-DA spin column (Millipore) and centrifuged at 5000 g for 10 minutes. The DNA was recovered in solution and precipitated in 1/10 V NaOAc and 2.5 V 95% EtOH (overnight) at −20° C. The precipitated DNA was then centrifuged, rinsed with cold 70% EtOH, air dried and resuspended in 20 μl of sterile deionized water. The DNA was checked on a 0.8% agarose gel (Sigma) to determine DNA concentration.

[0088] The detailed probe labeling, hybridization, removal of non-specifically bound probe, and probe detection procedures are described by Knoll and Lichter, In: Dracopoli et al., (eds), “Current Protocols in Human Genetics Volume 1”, Unit 4.3 (Green-Wiley, New York, 1994). Briefly, in order to label the probe, a standard nick translation reaction was carried out (Rigby et al., J. Mol. Biol., 113:237-251, (1977)) using digoxigenin-11-dUTP as the label. This yielded a series of overlapping 300-500 bp labeled fragments, which together comprised the 5170 bp probe.

[0089] The labeled probe fragments were then precipitated by adding 1/10 V NaOAc plus 2.5 V 95% EtOH and carrier DNA (overnight, −20° C.). On the following day, the precipitated DNA was centrifuged, lyophilized, and resuspended in deionized sterile water at a concentration of 125 ng/20 μl.

[0090] A comparison set of hybridizations were carried out with normal denatured human metaphase chromosomes, using the labeled probe fragments with and without blocking nucleic acid of the type described in U.S. Pat. Nos. 5,447,841, 5,663,319 and 5,756,696. Twenty μl of resuspended labeled probe was then lyophilized and resuspended in 10 μl of deionized formamide and denatured for 5 minutes at 70-75° C. to yield single-stranded nucleic acids. For comparison, probes were pre-reacted with purified repetitive DNA by adding 125 ng (or 20 μl) of labeled probe to 10 micrograms of C₀t 1 DNA (Life Technologies) and lyophilizing the mixture. This mixture was then denatured for 5 minutes at 70° C. followed by pre-reaction (or pre-annealing) for 30 minutes at 37° C. to convert the single stranded repetitive sequences in the probe to double stranded nucleic acid. This disables the hybridization between the sequences and the chromosome as target DNA template.

[0091] Subsequently, the denatured probes with or without purified repetitive DNA (i.e., C₀t 1) were mixed with 1 V prewarmed hybridization solution (comprised of 4×SSC/2 mg/ml nuclease free bovine serum albumin/20% dextran sulfate/30% sterile deionized water) and overlaid onto denatured target DNA. The chromosomal target DNA, fixed to a microscope slide had been denatured at 72° C. for 2 minutes in 50% formamide/2×SSC. A coverslip was placed over the probe hybridization mixture on the slide, sealed with nail polish enamel to prevent evaporation and placed in a moist chamber at 39° C. overnight.

[0092] Following hybridization, non-specifically bound probe was washed off with varying stringencies of salt concentration and temperature. The labeled probes, pre-reacted to disable repetitive sequence hybridization, and the probes without such pre-reaction were detected with rhodamine-labeled antibody to digoxigenin-11-dUTP, using a conventional FISH protocol (Knoll and Lichter, Current Protocol in Human Genetics, Vol. 1, Unit 4.3, Green-Wiley, New York, 1994). Chromosomal DNA was counterstained with DAPI. The cell preparations on microscope slides were then mounted in antifade solution (such as Vectashield, Vector Laboratories, Burlingame, Calif.) and visually examined using a fluorescence microscope with the appropriate fluorochrome filter sets. FIGS. 1 and 2 are photographs illustrating the results of the comparative hybridizations, where FIG. 1 is the hybridization with the blocking repetitive sequences, while FIG. 2 is the hybridization without pre-reaction with purified repetitive DNA. These photographs depict hybridization to both HIRA alleles on two normal chromosome 22q11.2 regions. A comparison of the photographs demonstrates that the presence of the blocking repetitive sequences is unnecessary using the probes of the present invention.

[0093] The remaining three probes identified in Table 2 were PCR-amplified and labeled as described above. These probes were used in a series of FISH experiments to determine the efficacy of the probes. Thus, all four probes were used together without pre-annealing of potentially repetitive sequences (FIG. 6), and a combination of the three shortest probes were used on cells from a patient affected with DiGeorge/VCFS with a previously confirmed deletion (FIG. 12). In the FIG. 6 photograph, the probe was hybridized to a single region of both chromosome 22s in a normal individual (arrows) In FIG. 12, only one chromosome 22 hybridized (arrow). The other chromosome 22, as indicated by a star, has a deletion of this region and does not hybridize to the probe.

### Example 2

### Development of NECDIN and CDC2L1 Gene Probes

[0094] The techniques described in Example 1 were used to develop a series of probes for detecting known genetic disorders on chromosome 1 (Monosomy 1p36.3 syndrome; Slavotinek et al., J. Med. Genet., 36:657-63 (1999)) and on chromosome 15 (Prader-Willi and Angelman Syndromes). Approximately 70% of patients with Prader-Willi or Angelman syndrome exhibit hemizygous deletions of the sequence containing the NECDIN gene (Knoll et al., Amer. J. Med. Genet., 32:285-290 (1989); Nicholls et al., Amer. J. Med. Genet., 33:66-77 (1989)). The presence of excess copies of this gene is diagnostic for an abnormal phenotype in patients with interstitial duplication or a supernumerary derivative or dicentric chromosome 15 (Cheng et al., Amer. J. Hum. Genet., 55:753-759, (1994); Repetto et al., Am. J. Med. Genet., 79:82-89, (1998)). The following Table 3 sets forth the deduced single copy intervals, PCR primer coordinates, SEQ ID Nos., and the lengths of the resultant probes.

TABLE 3

| | | | Coordinates | Forward | | | |
|---|---|---|---|---|---|---|---|
| | | GenBank Accession | of Longest | PCR Primer | Reverse PCR Primer | PCR Primer SEQ | Probe |
| | Chromosome | No., Chromosome | Single Copy Intervals, | Coordinates, | Coordinates, | ID Nos., | Length |
| Gene | Band | Genomic Sequence | Beginning/End | Beginning/End | Beginning/End | Forward/Reverse | (bp) |
| CDC2L1¹ | 1p36.3 | AL031282 | 8823/17757 | 9137/9167 | 13960/13931 | 444/443 | 4823 |
| CDC2L1¹ | 1p36.3 | AL031282 | 8823/17757 | 13028/13057 | 17752/17720 | 445/446 | 4724 |
| NECDIN | 15q11-q13 | AC006596 | 94498/99152 | 94501/94535 | 98567/98601 | 439/440 | 4166 |
| NECDIN | 15q11-q13 | AC006596 | 68031/75948 | 72122/72156 | 75666/75637 | 437/438 | 3544 |
| NECDIN | 15q11-q13 | AC006596 | 76249/79221 | 76608/76639 | 78898/78867 | 441/442 | 2290 |

¹Two sets of primers were used to generate two DNA probe fragments which, together, spanned the entire interval.

[0095] PCR-amplification was performed using the CDC2L1 primers in Table 3, and products were labeled, hybridized and detected as set forth in Example 1. The labeled probes were used in a series of FISH experiments, with images of the hybridizations provided as FIGS. 7-10. In the experiment shown in FIG. 7, the longest 4823 bp probe was employed and potential hybridization repetitive sequences was disabled by pre-annealing with purified repetitive DNA. As a comparison, the same probe was used without pre-annealing of purified repetitive DNA (FIG. 8). The hybridizations appear identical demonstrating that the presence of purified repetitive DNA to block repetitive sequence hybridization is unnecessary. In both instances, the chromosomes with one or both chromatids hybridized are indicated by arrows. In the experiments shown in FIGS. 9 and 10, the 4823 bp and 4724 bp probes were employed, with (FIG. 9) and without (FIG. 10) pre-annealing of the purified repetitive DNA. Again, pre-reaction of the purified repetitive DNA is shown to be unnecessary using the probes of the invention.

[0096] The NECDIN probes were also used in a series of FISH experiments, as shown in FIGS. 3-5 and 11. These probes detected DNA sequences between 36 and 62 kb distal of the NECDIN gene. The 3544 bp probe (SEQ ID Nos. 437-438) detected the 3′ terminus of the MAGEL2 gene. In FIG. 3, the 3544 bp probe was used on metaphase cells from a normal individual, with pre-annealing using purified repetitive sequences; FIG. 4 is a comparison, without pre-annealing. In FIG. 11, all three probes were used in combination, on metaphase cells from a patient affected with Prader-Willi syndrome known to harbor a deletion of 15q11-q13 sequences on one chromosome 15. The normal homolog is indicated by an arrow and shows hybridization to a single chromatid. The location of the deleted chromosome is indicated by a star. It does not show hybridization with the probe.

[0097] The foregoing examples demonstrate that the mixed combinations of DNA fragments give identical hybridization results, as compared with the fragments when used individually. This establishes that none of the fragments used individually or in combination will hybridize to any other location in the genome and hence, are free of repetitive sequences. This provides an additional confirmation of the validity of the present method for the design and production of single copy genomic probes.

[0098] Current use of commercial and research genomic probes to detect these disorders requires that hybridization of repetitive sequences be disabled prior to annealing of the probe to metaphase or interphase chromosomes. This increases the number of steps required to perform the protocol and could potentially increase the chances of procedural errors occurring, any of which would be unacceptable in the clinical diagnostic laboratory. The results present in FIG. 7 are comparable to those obtained using related commercially available genomic probes to detect these abnormalities. Hence, these probes will be useful in the detection of these genetic disorders. The probes themselves or in combination with other solutions necessary for hybridization and detections can be provided to clinical laboratories as kits for detection of these genetic disorders.

[0099] The probes developed from genomic sequences other than those presented as examples cited herein can also be utilized to detect inherited, sporadic, or acquired chromosomal rearrangements. These rearrangements may correspond to numerous other known genetic abnormalities (including neoplasias) and syndromes besides those examples given above. Hence, the present invention can be useful for producing probes from genomic regions for which probes are not presently commercially available.

[0100] In principle, the present method can be utilized to design, develop and produce single-copy genomic probes for any genomic interval where the DNA sequence is available and where a comprehensive set of repetitive sequence elements in the genome has been cataloged. Such catalogs are currently available for genomes for the following organisms (http://www.girinst.org): Homo sapiens, Mus musculus, Arabidopsis thaliana, Canorhabditis elegans, Drosophila melanogaster, and Danio rerio.

[0101] All references cited above are expressly incorporated by reference herein. In addition, the subject matter of Disclosure Document #471-449 filed Mar. 27, 2000, is also incorporated by reference herein.

1. A nucleic acid hybridization probe which will hybridize to a nonrepetitive portion of target nucleic acid, said probe comprising a labeled, single copy human nucleic acid sequence of known sequence, said probe having a length of at least about 2000 nucleotides, said probe being free of the repeat sequences identified as SEQ ID Nos. 1-428 and 447-479 and subsequences thereof, said subsequences containing at least 17 nucleotides, at least a portion of the human nucleic acid sequence being derived either from an intron or an intergenic region wherein an intergenic region begins either upstream of the transcription initiation site or downstream of the polyadenylation site, and said probe being complementary to a non-repetitive portion of the target.

2. The probe of claim 1, said human nucleic acid sequence being human genomic DNA.

3. The probe of claim 2, said human genomic DNA being derived directly from PCR amplification of human genomic DNA.

4. The probe of claim 1, said human nucleic acid sequence being single stranded.

5. A modified human DNA sequence isolated from its natural environment which will hybridize to a portion of target human DNA, said sequence comprising a single copy human DNA sequence of known sequence having a length of at least about 2000 nucleotides and being free of the repeat sequences identified as SEQ ID Nos. 1-428, 447-479, and subsequences thereof, said subsequences containing at least 17 nucleotides, at least a portion of the human nucleic acid sequence being derived from an intron or an intergenic region wherein an intergenic region begins either upstream of the transcription initiation site or downstream of the polyadenylation site, and said probe being complementary to a non-repetitive portion of the target.

6. The human DNA sequence of claim 5, said human DNA sequence being single stranded.

7. A hybridization method including the steps of contacting a target nucleic acid sequence with a probe in accordance with claim 1 under conditions permitting the probe to hybridize to at least a portion of said target nucleic acid sequence.

8. A hybridization method including the steps of annealing a target human DNA sequence to a single copy human DNA sequence in accordance with claim 5 under conditions permitting the single copy human DNA sequence to hybridize to at least a portion of said target human DNA sequence.

9. A method of developing a hybridization probe for a target nucleic acid sequence, said method comprising the steps of:
determining the sequence of at least one single copy sequence in said target nucleic acid sequence computationally, said determining step comprising the steps of ascertaining the nucleotide-by-nucleotide sequence of said target nucleic acid sequence, comparing said ascertained sequences with the sequences of known repeat sequences in said target nucleic acid sequence, and identifying said single copy sequence from said comparison, said known repeat sequences appearing at least 10 times in the genome and having at least about 50 nucleotides; and
developing a hybridization probe comprising a sequence complementary to a non-repetitive portion of the target which hybridizes to at least a part of said identified single copy sequence.

10. A method of identifying a single copy sequence interval from a target nucleic acid sequence computationally, said method comprising the steps of ascertaining the nucleotide-by-nucleotide sequence of said target nucleic acid sequence, comparing said ascertained sequences with the sequences of known repeat sequences in said target nucleic acid sequence, said known repeat sequences appearing at least 10 times in the genome and having at least about 50 nucleotides, and identifying said single copy sequence from said comparison.

11. A modified human DNA sequence which will hybridize to a portion of target human DNA, said sequence comprising a single copy human DNA sequence of known sequence having a length of at least about 2000 nucleotides and being free of the repeat sequences identified as SEQ ID Nos. 1-428, 447-479, and subsequences thereof, said subsequences containing at least 17 nucleotides, at least a portion of the human nucleic acid sequence being derived from an intron or an intergenic region wherein an intergenic region begins either upstream of the transcription initiation site or downstream of the polyadenylation site, said human DNA sequence being modified so that it is detectable, and said probe being complementary to a non-repetitive portion of the target.

12. A nucleic acid hybridization probe comprising a labeled, human nucleic acid sequence having a length of at least about 2000 nucleotides and being free of SEQ ID Nos. 1-428 and 447-479 and 17 mer subsequences thereof, said probe being complementary to and hybridizable with a nonrepetitive portion of target human DNA, said target human DNA comprising the known sequence of the human genome, at least a portion of the human nucleic acid sequence being derived either from an intron or an intergenic region wherein an intergenic region begins either upstream of the transcription initiation site or downstream of the polyadenylation site, and said probe being complementary to a non-repetitive portion of the target.

The application's sequence listing, which the Patent Office published only in electronic form, follows.

SEQUENCE LISTING (479 sequences)

SEQ ID NO: 1 - DNA, 171 bp, Homo sapiens
  repeat_region (1)..(171): ALR
aattctcagtaacttccttgtgttgtgtgtattcaactcacagagttgaacgatcctttacacagagcagacttgaaacactctttttgtggaatttgcaagtggagatttcagccgctttgaggtcaatggtagaataggaaatatcttcctatagaaactagacagaat

SEQ ID NO: 2 - DNA, 290 bp, Homo sapiens
  repeat_region (1)..(290): Alu
ggccgggcgcggtggctcacgcctgtaatcccagcactttgggaggccgaggcgggaggatcacttgagcccaggagttcgagaccagcctgggcaacatagtgaaaccccgtctctacaaaaaatacaaaaattagccgggcgtggtggcgcgcgcctgtagtcccagctactcgggaggctgaggcaggaggatcgcttgagcccgggaggtcgaggctgcagtgagccgtgatcgcgccactgcactccagcctgggcgacagagcgagaccctgtctcaaaaaaaa

SEQ ID NO: 3 - DNA, 68 bp, Homo sapiens
  repeat_region (1)..(68): bsr
gatcagtgcagagatatgtcacaatgcccctgtaggcagagcctagacaagagttacatcacctgggt

SEQ ID NO: 4 - DNA, 382 bp, Homo sapiens
  repeat_region (1)..(382): cer
ctgcagaacactacttccagggtctaaatgtctgtccttcacataggattccagaacactgctacgagagtgtgaatgtttgtccttcacatagcatttcacaactgccatggtctgaatggttgtccctcacatagtattccagaacactgctatgagggtctgaatgtttgtacctcacataggattccagaacactgctatgagggtctgaatgtttgtacctcacataggattccagaacactgctatgagtgtttgaaagtttgtccctcacataggattccagaagactgctgctggggtctgaatgtctgtccctcacatcggattccagaaccctgctgctggggtttgaatgtctgtccctcacatagaattc

SEQ ID NO: 5 - DNA, 2739 bp, Homo sapiens
  misc_feature (1195)..(1195): n is a, c, g or t
  repeat_region (1)..(2739): charlie1
cagcggttctcaaagtgtggtccgcggacccctgagggtccccgagaccctttcagggggtccgcgaggtcaaaactattttcataataatactaagacgttatttgcctttttcactctcattctctcacgagtgtacagtggagttttccagaggctacatgacgtgtgatgacatcatcgctctgatggctaatggaatgtgtgcttgtgtattcttgtgttttctaaaatttttaaggtagtaggtttagggtataaatatgtaggttttcagagattaactcagtttsttcttagcacttctaccgtgctcttactagctatcttcagttatacctgctataatctttgtaacctcattatcgtccaataaatcattattttraaatcctaaagttttcctcgwgcctatgtgaaaacacaagaagcaagtactacttgtaaaacttgcttgcaataacattttgaaaatttcccaaatgtttaaattttatcgacaacatatagaatttaatattttattctaaaataaaaatttatttataawgtttttcctatatttaagggtggattgttggcttaaaaaagggagattagaagactcgctttctcaacccacagctgcamcatctatgtctaaagatgctgaaatggacataccagcaagttctctgattcctcatggaarggaggaatctactccaaagaaactgggcgaaactgtaaataaaaaacaaaaatatgataaaagctatcttctcagctttatagatgttaataatttaccttattgtgtcttatgcaacagaacattttcgaatagtattatggtgccagttaagttgcggcatcattttgagaccaatcattcagagtttaaagaaaaaggaattaaatattttaaacgtagatgtgatgagctctttaaaagccaaaaattgtttgttgcagcttttcaaactagaaatgaaaaagccactgaagcatcttacaggataagttgccayattgcattggctggagaagcmcacacaataactgagagactaataaagcctcgaacagttgacattgctgaatgcctgctggatgaaaagtcagtaaaagaaatcatagcactgccactttccaatgatacgataactcgtcaaattaaagatttagctgcaaacatgaagaccgagttaatatntcatctgcagaattgtacttttgccttacaaatggacgaatctacagatgtkgctagacttgctgtgttgcttgcgttcgtctggtatcagcaccaactgatcatcgaagaacttcttttatgtgaattcttggcaacaaacacaagtggtgatgaaatattcaaagtgttgaatgacttttttgaatctcatgatttatcctggaacaactgtgttgacatttgcactgatggtgcaaaagcaatggtgggtaaaactgctggcgccttagcacgaatcaaggcagtggcaccaaactgtactagtagtcattgtattcttcaccgccacgcactcgcagtwaaaaaaatgccagtttcacttaagaatgtccttgatgaagcagtaaaaattattaattttattaaatctcaacccttgagtacacgtctttttaatattctgtgtgacaaaatgggaagtacgcataaagcacttctgctgcataccgaagtacgatggttgtctcgaggaaaagcacttgtgcgattgtttgagttgcgagctgaactagctgcttttttcatggaacaccatttttacttgaaagaacgactgacagacaaactatggttattcagacttgggtatttggcagacattttctcgaaaatgaacgaagtgagcctgtcacttcaaggaaaacaactgacagtatttgttgccaatgataaaattcgagctttcaagcgaaaattagaattttggaaaacttgtatccgccaccgtgagcttgacagcttcccaatacttaaagacttttctgatgagatcggtggtgatattaacgaatgtgattttttgatattgtataatgaaatgtgtcaacatttggaagatctgcataactcagtgaaccaatattttccaaatgaccaatgcatgatgttacaaaatcatgcatgggtaaaagatccattcaaagtgcaagatagaccaatggattttaatgtaacagagtatgaaaagttcattgatatggtttcagattccacattgcaactaacctttaagaaactaccacttgtcgagttttggtgtagtatcaaagaagaatatccacaattatctgaaaaggctattaaaatactcctcccttttccaactacatatctgtgtgaggccagattttcttcatatacttcaaccaaaacaacatatcgcaacagattgaatgcagaagcagatatgagaatccagctgtcttctattaagccagacattaaagagatttgcaaaaatgtaaaacaatgccactcttctcactaaatttttttgttttggaaaatatagttatttttcataaaaatgttatttatgttaacatgtaatgggtttattattttwaaatgaatwaataaatattttaaaaatttctcagttttaatttctaatacggtaaatatcgatagatataacccacataaacaaaagctctttggggtcctcaataatttttaagagtataaaggggtcctgagaccaaaaagtttgagaaccgctg

SEQ ID NO: 6 - DNA, 2760 bp, Homo sapiens
  misc_feature (173)..(173): n is a, c, g or t
  repeat_region (1)..(2760): charlie2
  misc_feature (363)..(364): n is a, c, g or t
  misc_feature (476)..(476): n is a, c, g or t
  misc_feature (510)..(510): n is a, c, g or t
  misc_feature (535)..(535): n is a, c, g or t
  misc_feature (541)..(541): n is a, c, g or t
  misc_feature (599)..(599): n is a, c, g or t
  misc_feature (625)..(625): n is a, c, g or t
  misc_feature (721)..(721): n is a, c, g or t
  misc_feature (764)..(764): n is a, c, g or t
  misc_feature (1088)..(1088): n is a, c, g or t
  misc_feature (1122)..(1122): n is a, c, g or t
  misc_feature (1155)..(1155): n is a, c, g or t
  misc_feature (1202)..(1202): n is a, c, g or t
  misc_feature (1220)..(1220): n is a, c, g or t
  misc_feature (1231)..(1231): n is a, c, g or t
  misc_feature (1399)..(1399): n is a, c, g or t
  misc_feature (1417)..(1417): n is a, c, g or t
  misc_feature (1430)..(1430): n is a, c, g or t
  misc_feature (1433)..(1433): n is a, c, g or t
  misc_feature (1453)..(1453): n is a, c, g or t
  misc_feature (1469)..(1469): n is a, c, g or t
  misc_feature (1472)..(1472): n is a, c, g or t
  misc_feature (1487)..(1487): n is a, c, g or t
  misc_feature (1488)..(1488): n is a, c, g or t
  misc_feature (1530)..(1530): n is a, c, g or t
  misc_feature (1564)..(1564): n is a, c, g or t
  misc_feature (1606)..(1606): n is a, c, g or t
  misc_feature (1695)..(1695): n is a, c, g or t
  misc_feature (2300)..(2300): n is a, c, g or t
cagtggtcttcaaactggggtatacatacccctgggggtacatgaagactttccaaggggtatgcgggcacggatagttttaagggaatcaatttccagatcctcarcttccatatgtactctttcctaaaactgatctgcctgagaacgcgcctgtggcgagggcctgccgnctttcccacttcccctttcacgatcgcccttctcccactttacaaaagaaaggcatacctctcacccatcccgaatcttactatggtgcattgccctggggtgtaaaaacctccggggcaccaaacaaagggacaattcgaaatactggtgttggtgaagcctcctttaatcaaggcaccataarcccgnngtacagttttatgtcttccctggctttayaaatatttctgttaagggtaaagcatgatgttggaacaaggtactttggcycatgttggggtgttctgaattcagatatatcntagagtggggtggtgggagtgatgacgatttttncttgacgatgttgcttcttccatcnctattnacaaagaatacattgctcctgaggaagagtcctgagagcaaagcaaagagaacattgntaagaaatggcgaagatggcagtgcnttatttcatccaggtgacaaactcatggcgaggtctatctatctgakagttggaatattcaagatwtgkaaaaggcattctgggaaataccaatcngctacgaagcatgcctcctctgcactttcaccattctcagtantgagaaagagcttggtgagtactctcattcacctgcgtcttagtctgkgtctcagttgcatattttgcatgatttcaaggmggtggaggcgaaaagctctgcaattacttctaacagatcaacattacattttcaagtaaaaggaacatatattggaggtaagttmrtgtatkctattttcttgaacatttattcagattmataggagaaacattttcattaacttttgccaaagatttctagatagtgtaaatatatttttctatttaggcamaagtctcctgctcactgtcactcatgaacmacttctctgttcatttattnattcctaccatatacttactagagttagattaanttaacaggaatatgttgcagattctactgtaantaatgcacwtaatagcagtcagtaatataacttttgtaaacccatanttattaatgatccaatancttctctctcnttttgctgwcgatttccacaaagtagattaaactgtactcttaaaagcagaacattcacttatgtacgagtgcaggacagaatgttccaaaatgcaatstagaatgcgatgcccwgaacttcagaaaaccagcttcacttaattaggattaatttctcccgctcggangctaatatactgttttanttctgtcaaatgnatnattataagtaataatttttnacaataacgaaattantantatatacatgaatannctcaagtgtccgtccctctgtcatatttttaaaatgcatttngagacgttcttaaaaaatgaaatwtggtattgtntataggtctctgttcgtagtcgakgagamaagtccccaaatncacaatttacaatttttcgwtttttccaactccttccatgtatattgaggtccataagcaaggtgcctctaagtgaaagagtagcaggnataattaatagtcatttgataagtcttggtgaagccttttgggtatacttcctagaaactgagaaagtgaatgactctaatgactgggtaacaaatccttttgcaagtcaggtggtttccaattctttgctttcaacaaaattgaaggaggacctaatcgagttgtcagctgacagatcattaaaaataatttttgatgatagatcaytatgtgatttttggcatataactcggaaggagttcaaagaattgagtgacattgctataacaaaactccttccattcccatctacttatttatgtgaacaagrtttctcagcgcttacatctataaaaatgaaaaataggaatagaattgatgctgaactctgtctcattctagcaataagtaatattcatccacggatacatgaactaattggggaaacaaggccccatccatctcattaagagatgcatttccaataaaattttactttttatgtttawtatttatcaaaatttgtaatatgtttatgttgttttgatcaattgtatattaataataattgtaatgataactcaatccagaagaaaawttttaacacttagagccttatggtcanarkaaatataaaaaattaaatttcaatttatatacatatttttgttgcagagaagtatgatagggtgatcaataaaagactttcaagcataaaaatatattacattaggataaaattctgtgggggaagtggaatggaaatacgagttcaaggagaaaaagagaacaatgtaaaatttccgactgttaaagaagagcttgctcatgtattttttaaatggatgatggtgggtatcaaatcgctatggtatttagattccattggatacatttaaaagagtgatgtaacagttttattttaaaatgtcaatatttacaatatgccagaaattacatcctttgcaactatttaaacttatgatgaaaaattttagatgtcaacttaaaaatgtgcgagggrgtacatagtttttcaaaattcttttaggggatacgcaagcaaaaawgtttgaagaccactg

SEQ ID NO: 7 - DNA, 2710 bp, Homo sapiens
  repeat_region (1)..(2710): charlie3
  misc_feature (744)..(744): n is a, c, g or t
  misc_feature (747)..(747): n is a, c, g or t
  misc_feature (954)..(954): n is a, c, g or t
  misc_feature (1703)..(1703): n is a, c, g or t
caggggtccccaacccccgggccacggaccggtaccggtccgtggcctgttaggaaccgggctgcacagcaggaggtgagcggcgggcgagtgagcgaagcttcatctgtakttacagccgctccccatcactcgcattaccgcctgagctccacctcctgtcagatcagcggtggcactagattctcataggagcgcgaaccctattgtgaactgcgcatgcgagggatctaggttgcgcgctccttatgagaatctaatgcctgatgatctgaggtggagctgaggcggtgatgctagcgctggggagcggctgcaaatacagattaacattagcagagaggtttgactgcacagagaccataataaatcaattgcttgcagactcatatcaaaaccctatcagtgagtggcaagtgacaattaagctgcatctggtggcaggctttatagtggcaagtgagttgatgtacttcaattgtacagctgcatctggtggcaggctttaagtcagaatccgacacttattttagtccgcgcgtggcctgctcattattttatttaccacttccatccgcgcctctttcccgcactgcgcacttgtctcagtcacagttttggtaagcccacaagctaaccctagccaaaatgagtaaaaaacaaacgtcactggagagcttctttgaaaagggggaaagacccaatgatgagacagcagaagactctaagactgccaamaaaaanaangctgcatttaaaagaaaataccaagagtcctacttaaattacgggttcattgcaacaggtgattcacattctccaagcccgctttgtataatatgtggtgaccagctatccaacgaagccatgaaaccttcaaaactgcttcgccacatggagaccaagcaccctgcattagaagacaagcctttggagtttttcaaaagaaaaaantgtgaacacgaagaacagaagcaattattgaaggccaccacttcatcaaatgtgtctgcactgagagcatcattcttagtggctaaccacattgctaaagctaagaagccctttactgttggtgaagagkktgatcctgcctgctgccaagssacatttgtcatgaactctwaggagasgmtgcmsttcaaawggtggcatgtgttcmtctttcakctttcagccaccacaacmagacgaactggtgaaacagcagaggatattgaggcacagttgttagagaggatkaatgagtcaccgtggtatgcaatccaggttgamaagtctaccagtgttaacaacaakgmaacaakgcttgcttttgtgkgatatatttttcaggaggatgcgcawgaggatatgttatgtgcacttttgttgccaaccaacaccacagctgcagaattattcaagtctttgaatgattacatatcaggaaaactgaattggtcattttgtgtcggtatatgcacagacagagtggctgccatgactggatggctttctggtttcactactcgggtcaaagaggtcgcttctaaatgtgagtctacacactgcgtcatccatagagaaatgctggctagctggaaaatgtcacctgaacttagcmacgttttgcaggatgtsmttaaaattatcaaccacattwaagtacatgcccttaactcacatctgttcgcgcagctctgtgaggagatggacgcagngcacacacgtcttctcttatacacagaagtgagatggctttctaaaggtagatcactggccagagtttttgagttacgagagccgctccagagatttcttttagaaaaacagtcaccactggcagcacatttcagtgacatagaatgggtcgcaaaacttgcttacttgtgtgacatattcaacctgctcaacgaactcaatctgtcacttcaggggagaatgacaactgtgttcaagtcggcagataaagtggctgcattcaaagccaaactggaattatgggggcgacgagtgaacattgggatttctgacatgtttcaaacattagcagagattttgaaagagactgagccagggccttctttctcccagctggtgcatgatcacctatctcagctttcaaaagagtttgagcattacttcccaaccacaaaggaccccagaactgggaaggaatggatccgcgacccatttgtgaataagccagstgaatcgactttgtccgtgctagaagaggatcaactgcttgagactgcaaatgacggtggccttaaaagtatgtttgagacaacttcaaatctccatacattctggattaaagtcaaagcggaatatcctgagattgccacgaaagcactgaaaagcctgcttccatttccagcatcctatctttgtgaagcagggttttctgcagtgacagcaaccaaaacgagattacggagtagactggacataagcaacacacttcgggtgtcgctgtctcccatcacccccagatgggaccgtctagttgcaggaaaacaagctcagggctcccactgattctacattatggtgagttgtrtaattatttcattatatattacaatgtaataataatagaaataaagtgcacaataaatgtaatgcacttgaatcatcccgaaaccatcccccccccctggtccgtggaaaaattgtcttccacgaaaccggtccctggtgccaaaaaggttggggaccactg

SEQ ID NO: 8 - DNA, 2585 bp, Homo sapiens
  repeat_region (1)..(2585): charlie5
  misc_feature (91)..(91): n is a, c, g or t
  misc_feature (143)..(143): n is a, c, g or t
  misc_feature (413)..(413): n is a, c, g or t
  misc_feature (786)..(786): n is a, c, g or t
  misc_feature (838)..(838): n is a, c, g or t
  misc_feature (918)..(918): n is a, c, g or t
  misc_feature (1043)..(1043): n is a, c, g or t
  misc_feature (1212)..(1212): n is a, c, g or t
  misc_feature (1257)..(1258): n is a, c, g or t
  misc_feature (1305)..(1305): n is a, c, g or t
  misc_feature (1709)..(1709): n is a, c, g or t
ctgcgctgtccaatacggtagccactagccacatgtggctaytgagcacttgaaatgtggctagtgcgactgaggaactgaatttaatttntattattaatttaaatttaaatttaaaaactgaaacagtataaaatattttnccattaaacayaactttattgttttggtaggactatayttcactttaaccattgcatcgcgkcatatagatattgttgtattgtagtgcgcgtgtcgggtacgtgcgtcatttctagtattacacgtaaacacatcactaatctagtcggtgtcaayagattgattcagttcaaatgatttttttctrtgcactgatgtaacattgtaatgtgtttatttgaatattttatgcagacagcacgarttacagtgatacctatgtaaatcanaattggtaactaaattgaaatacttattattttmattattataaattattttcttagttaaaaataaatgtggamaaatttaaatttaaaacgaaggcatactactgatgtagaattgagtggagatgcagaagttagtactatgactagaatagtaaagaaacaagagactggaagaaggtatgtcgcaaatttcatgatgaatggcaattgcaatttgctgcggcagagcaaaacaaaaaagctgtttgttgtgwaaaaaatgttaaagataacaaagtagacaatattgagagacattttcagcaaatacatagtgaatttgataagtttctcctccaamagtcaaaaaagaattaacaaaattagtcgnctgaaatcagaattaaatgtccaacaaaaaatatttaataagttttaacagnatctaagcttgtaactttggccagctataaaatgtcttggattcttatwcaaaaaaagaaaacaattttagatggagagntggtaaaagaaattatttcagttatggaaattttgttagaaagttatgaggaaaagactaaaaagatattttacaaaaagtgaaagatcttcaattaagccaccaaacaattgcccgtagaatgnaagaccttkctaacaatatcaaagataaattgattcaaaatttgaaaaattgcaagkactttagctttagatgagtcgtgtgatatgagacactgcccaattaatactttgggtatgttttactcaaaggacttscaaatttacaaagaaatctgttgtcaattcatgncttaaaaaactcgtagcaaagattttttaaactcttttacatctnncaaagaakaatttcacttagatatgaaaaaaaatktttctatcacgncggatggtgctccagctatgttaggtcaaaaatccagatttattggaattttaaaacaagagactgatgttttccttattgcttcattccactgwatgatacatactgaaaatatttgtgctcagttttctgaagcagactccgtgaaaggwgtcatgggtacagttgttaaaattsttcagtatatacgtgcaaatgctgtgaatcaccgccagtttatggaactgttgaaagaaatagaagacaatgaatttaatgatcttgtgttctttgccaatgttcattggttgagtcatagaagagttttacaaagatttactgtactgttaactccaattcaagattttcttgaaacaaaaggaatgcttgccaaatattcaataatcaaagacaaaaaatggcantgtgatttacgttttctcaccaatatcacactgcatatgaacaagctaaatttgaagctccaaggaaaggaaaagcttatttgtgacctagctagacaggtataagaatttatgttgaaattgaaacttttcataatacaaatcaataataatgattttacacatttttctaacgtgaatcaatatgcagaagattttaattgtaattgacagtattatgtaaattggctgcaaaaactacaagaaaaatttgaagaatattttgttgatattgataaatttagaattgcttttcaatttatgcaatacccctttgaattcaatgttaataatactgagttgacacaagaattagtgaatttacttaacttggacagacatagttttgaaactgatatscttttgcttcaaagtaaaatcaattcttctaaaaaaatgaaccagttttgtcaatgtggatttaaatattaaaagaaaatgatttttgatactcgattcagttattggaaaacttttaagtatgtttggaacaacttgggtatgtgaatctactttttcaactgtaaattttatgaaatctaaatacagatcaagtatttccgatgaaaatttagcgtccgaattgagatgtgctgtaagtgtaaaatacacaccggatttcgaagacttagtatgaaaaaaagaatgtaaaatatctcattaataatttttatattgattacatgttgaaatgataatattttggatatattgggttaaataaaatatattattaaaattaatttcacctgtttctttttactttttttaatgtggctactagaaaatttaaaattacatatgtggctcgcattatatttctattggacagcgctg

SEQ ID NO: 9 - DNA, 2869 bp, Homo sapiens
  repeat_region (1)..(2869): charlie6
  misc_feature (37)..(37): n is a, c, g or t
  misc_feature (47)..(47): n is a, c, g or t
  misc_feature (50)..(50): n is a, c, g or t
  misc_feature (54)..(54): n is a, c, g or t
  misc_feature (104)..(104): n is a, c, g or t
  misc_feature (115)..(115): n is a, c, g or t
  misc_feature (135)..(135): n is a, c, g or t
  misc_feature (149)..(149): n is a, c, g or t
  misc_feature (156)..(156): n is a, c, g or t
  misc_feature (179)..(179): n is a, c, g or t
  misc_feature (246)..(246): n is a, c, g or t
  misc_feature (258)..(258): n is a, c, g or t
  misc_feature (293)..(293): n is a, c, g or t
  misc_feature (321)..(321): n is a, c, g or t
  misc_feature (338)..(338): n is a, c, g or t
  misc_feature (359)..(359): n is a, c, g or t
  misc_feature (415)..(415): n is a, c, g or t
  misc_feature (501)..(501): n is a, c, g or t
  misc_feature (533)..(533): n is a, c, g or t
  misc_feature (566)..(566): n is a, c, g or t
  misc_feature (630)..(630): n is a, c, g or t
  misc_feature (646)..(646): n is a, c, g or t
  misc_feature (669)..(669): n is a, c, g or t
  misc_feature (673)..(673): n is a, c, g or t
  misc_feature (713)..(713): n is a, c, g or t
  misc_feature (745)..(745): n is a, c, g or t
  misc_feature (764)..(764): n is a, c, g or t
  misc_feature (808)..(808): n is a, c, g or t
  misc_feature (811)..(811): n is a, c, g or t
  misc_feature (877)..(877): n is a, c, g or t
  misc_feature (882)..(882): n is a, c, g or t
  misc_feature (908)..(908): n is a, c, g or t
  misc_feature (993)..(993): n is a, c, g or t
  misc_feature (1023)..(1023): n is a, c, g or t
  misc_feature (1049)..(1049): n is a, c, g or t
  misc_feature (1100)..(1100): n is a, c, g or t
  misc_feature (1204)..(1204): n is a, c, g or t
  misc_feature (1228)..(1228): n is a, c, g or t
  misc_feature (1255)..(1255): n is a, c, g or t
  misc_feature (1266)..(1266): n is a, c, g or t
  misc_feature (1269)..(1269): n is a, c, g or t
  misc_feature (1284)..(1284): n is a, c, g or t
  misc_feature (1292)..(1292): n is a, c, g or t
  misc_feature (1298)..(1299): n is a, c, g or t
  misc_feature (1335)..(1335): n is a, c, g or t
  misc_feature (1483)..(1483): n is a, c, g or t
  misc_feature (1494)..(1494): n is a, c, g or t
  misc_feature (1590)..(1590): n is a, c, g or t
  misc_feature (1608)..(1608): n is a, c, g or t
  misc_feature (1610)..(1610): n is a, c, g or t
  misc_feature (1621)..(1621): n is a, c, g or t
  misc_feature (1665)..(1665): n is a, c, g or t
  misc_feature (1672)..(1672): n is a, c, g or t
  misc_feature (1733)..(1733): n is a, c, g or t
  misc_feature (1824)..(1824): n is a, c, g or t
  misc_feature (1930)..(1930): n is a, c, g or t
  misc_feature (2014)..(2014): n is a, c, g or t
  misc_feature (2047)..(2047): n is a, c, g or t
  misc_feature (2198)..(2198): n is a, c, g or t
  misc_feature (2211)..(2211): n is a, c, g or t
  misc_feature (2220)..(2222): n is a, c, g or t
  misc_feature (2452)..(2453): n is a, c, g or t
  misc_feature (2466)..(2466): n is a, c, g or t
  misc_feature (2486)..(2486): n is a, c, g or t
  misc_feature (2555)..(2555): n is a, c, g or t
  misc_feature (2623)..(2623): n is a, c, g or t
  misc_feature (2683)..(2683): n is a, c, g or t
  misc_feature (2742)..(2742): n is a, c, g or t
ttgcttgkgcccaktttcggkcwgtgatgcaagatangggaagctantgntaantggtgagtgctgcattacacagamgagaggggcggtaaaccgatgacatnagtttcccctnctccaattatttcccccagnctccccttatgcgntgccggntgacttaaggaacgaacaacctncgctagtataacgaaaatcagagggaatttgttttcattctaaggaaggagtttttacgtgccgcanctcagctctctncctgmcactttgttgttaaaacattgcaaaacgtnggttcaagtaggctagaagtgaattgtncagtgaagttttwttanttttgagattttcttgtttangtatgcttttwtgtttttcttttaactaatgtttgtgttttataaacatgtctganagcccaatgtggcaatttttgaaggcgagatgtgagatggaagaggaagwttctaggcctgggtctacggacaattctgataaggntagtgatgaaggattatagccttctgagtatncttcagtgtactagtgcaacaagggacacaganaaagtctatctttacgacgaaagccacttatcaakggttttatatgggctggtagtccaagctntcttattccattgtgnatcgtctgtggcaaacaacttanaaangcagcaatggctccagcaaaattgaaaaaacaccgtaacnataagtcacagctatttgacaagtaaagatgntgattatttttaaacggcnattggactctcaaaacaaacgagtaaagctttcgttcaaaaawnacntttagtgaaaaggctcaggaagcaagttatttagtagcagaacttattgcccagaaaaggaaaagncacanggttggtgagaacctaataatgccancatgtaaaattacagtgaatcaaagcctgggcaagatgcagtacgagaaattgaaaaggctccactctcaaacagtgcgataagntgacgtattgatgacatgtcacatgatgcnaaagaggttttgtgtaataaactganaaatagcagcttctctatccaggttgatgagtcaacagatttcactaatanatgtcatgctgtagcatttgtaagatttgtaaaggatggtgaaattcaagaaaacattttctgctgcaaagagctgcccaaaacaaggaaaggccaagatatanttaatgttttgacttcatatctgnaaaccagaggtctmagaaccgcgctgncatctacactnatngtgctccgtcagtanttggttcnatgagnnattttgcgttattaaataaaaaaagagaagkcctknttttcacattacagcacactgctttctccacagagatgctgatgtcaaaaactcttggagatacagtgaaagttctggataatgttacaaaactggttacctktattaacaaaggccaatttatgcgaaaatkttaaaaaaaaaaaangagacaacctnggcagasagcacataaacctcctgcaccatacagamatccggtggcttmkcagaggaagcgttctcwacagggtgtttgagttgaagggtgaattnccagagtactttcaawananggccggccagnttttgctgagtgctttggaatgaaaaatggctgcagaaagtcgnctacttngcagacatttttcatcacatgaaccagtgaacaagtctctgcaaggccctggagaaaatgntttkacttcgagtgacaagatttttggatttaaaaggaaactgaatctttggaaaagtcatgttgcaaaaggaaatcttgaaatgtttccnctgctgcttgggcttgagagtgaggaaggatatcagcmagtctcaagtcttactgaaaaccgcctggaagaaccgcagaacaaaacaaatggcattttccctcccnttcaacacaagtgtgtggctaggtgagggaccctttctctgaatctgctcagcctgagaacctggctttgagagaagagaaagnactttgtgagttgcggtctgatcgcacattcangatgagatttcctkatttttaccctaggcgcgttctggatcccwgtgamagaagmmtctcctgccactcgcaggaaagcagtgggcatktktgccgwgsttctcmacctcctkcatgtkgswkkaacaggctcgctcacgttttactaagnatcaagagcaagngcagaaatnnnctcatttcagttgaaaatgaaatctttatgtagctgtstsawgctcgatcmataattgagtgaaataaactgatcattaactatgtacaggtttcatgtgagagagtaacatatttttagtttaagtttcaaaaacaktgttttagtctatgcatgtgtaagcctaaaacagagatcaagaaactaatgtacatatataaaaatattattaacttctaggcctgtatttnnacctgatcatgtnactcagtaagaaatgttatnttttcaaagtcttatataaaattgtgcttaggctatattttattcatatttctttgcttacagttttantagctttactattcaacattgccaataaattttcatgttgtaaataacattaattaaaatcaatttanaatatttatttaaattaaatctaccgagcctacttttagaaaaattaaattccattttgnctcaagccagttatttaacagaaatttgcttgtcttatgtttttttaatttatgaaaangaaagaaagatwatttcaagaamagtaagctawgtctaacawcttttttctaggtaaaakttggmtagawggtmactcttakcttcwaatawggaagaatgtamaactagtcttgtatgtwcmatgt

SEQ ID NO: 10 - DNA, 2285 bp, Homo sapiens
  repeat_region (1)..(2285): cheshire
  misc_feature (377)..(377): n is a, c, g or t
  misc_feature (580)..(580): n is a, c, g or t
  misc_feature (651)..(651): n is a, c, g or t
  misc_feature (664)..(664): n is a, c, g or t
  misc_feature (725)..(725): n is a, c, g or t
  misc_feature (728)..(728): n is a, c, g or t
  misc_feature (1095)..(1095): n is a, c, g or t
  misc_feature (1151)..(1151): n is a, c, g or t
  misc_feature (1281)..(1281): n is a, c, g or t
  misc_feature (1351)..(1351): n is a, c, g or t
  misc_feature (1370)..(1370): n is a, c, g or t
  misc_feature (1385)..(1385): n is a, c, g or t
  misc_feature (1885)..(1885): n is a, c, g or t
  misc_feature (1912)..(1912): n is a, c, g or t
  misc_feature (1990)..(1990): n is a, c, g or t
caggggtcggcaaactatggcccatgggccaaatctggcccaccgcctgtttttgtactgcccgtaaactaagaatggtttttacatttttaaatggttggaagaaaaatcaaaagaagartattttgtgacatgtgaaaattatatgaaattcaaatttcagtgtccataaataaagttttattggaacacagccacgcccattcgtttatatattgtctatggctgcttttgcgctacaacggcagagttgagtagttgcgacagagaccgtatggcaytctcattgcctttgcactsctgtttctraactataaccagtgttttgagtgccatgcatattactgtactgtaacattttwttytattattaatgnatacycatcatgtcaaaacaagaaaagaagagaaaagtrgactttgaatgttrcacttttaaggcacaatggagtatggattattttgttatggcaaagcattttattatgcaatgacactatagctgtgctaaatacaatatacattgacattaccagactaagcactcatcacartattcccaaatcacaggaaagcaatngtcagaaaaattagaaaatttaaaacagaatatctcatcacagcagaatttcttcacaaaawtaaaaaatnaaaatgaggctgnaaccaaagtaagtttctgagtggctcatttgttagccaaggaaggaagtcatttaccaatngtnaattaattaaatcatgttgattgcagcaggcatagaaatgtgtctagagaaaataaacttaaaactattagccttttgataagaagagttgcttaaagagttgaggacatcaataatcaattaaaaaggcaaatgrttttgagtggttttccttggctcttgatgagttgacaggtgttactgatactgctcagttgtttatttgaggagtcaatgctgagtttgaagtgctgaatagccttaatgaatagtctgtgtggaataattgcagacaagaatatttcaaaaagttgagaaaacactaattyagtacaacctgaaggaagtggaatctgctaagatgtgttaaaactgatggtggtaaaantatgtgtggagcagaaaaaagcttagttggacaaataaagctgtgaaaatgtaagntgtttaaagyctatggttatttattttattcatcagcaagtactttgtagaaaatatttgaatctatcatgtgatattgaaccagtagtgtcaacatttgctcttgtggacttaaccattgtcagttctntaaatttttgtcagaaatagaagctgaatatcctgacttgccctgctatacagyagtttgatggcttagnagtgctaaagctttattgntattttttgagctynggactgagattgaaatttttctgaatgagaagaactrctctcaaactrtttatcaaacactgagtggctttggaaattagcttttgctgcagatttgataatatttcttaataaattcaacctaaaattacaaggcaaaacagcacttatattgaaacttatactgttgtaaagtcatttcaatgrcaacaactattgtttgaatcacaagtaatgtcaagctgctttatatacttcccatgctatcaaaagttaaaacaaagaagtaagatctccattcccacacaatttgtagcagatatattttccaaactcaaactacagttccagcagcattttttggaccttgatgcaagtgcaaaggaaatwtccatttaactgtgcaattgagaagcttcctacctaaccttcaattggaatgattaatctgcaagtaatgacatgcaaatatcaagagaaaattctataaatgccttccaagcaatgaatatgctcaattnaaatcatatgctcgtgattgatatcantatttggcaatacctatcctgcgttgaaaataaaacattttcaaacatgaaatrtgttgcattacagattagcatttnaacagatgaacatttgcaatcrattttgatgatagggaacactaactttgaaccccaattaagcaaaatgttatcccwaaaaagaattccattcttctcattagtagacctgtattacaaaaaattgtactcaattattattwttattatattttgaatttcatcaataaaaattgtggaattttttctcttgttatataagtacctacataatatccttgattttgcctcttggcccgcaaagcctaaaatatttactatctggccctttacagaaaaagtttgccgacccctg

SEQ ID NO: 11 - DNA, 453 bp, Homo sapiens
  repeat_region (1)..(453): cr1_hs
  misc_feature (199)..(199): n is a, c, g or t
gaggttcaacaaggccaagtgcaaagtgytgcacttgggttggggcaatcccaggtatrtatacaaactggggaactatgagcttggcagcagccctgtggagaaggatctgggggttctagtggatgawaagtttaatatgagccagcagtgtgctgttgctgccaaaaaagccaacagtatcctgggctgcattaanaagaggattgacagcagatcamgggaagtgattatacccctttacaatgccttggtgaggccacatttggaatactgcatccagttttggtcaccccaatrcaaaaaggatgttgagactttagagagagtacagagaagagcaacaaagatgatcagagggctggaggacctaacctatraggaaaggytgatggaattgggcttgtttagtttgragaagagaaggatgaggggagacatgatagcagcctt

SEQ ID NO: 12 - DNA, 75 bp, Homo sapiens
  repeat_region (1)..(75): ggaat
ggaatggaatggaatggaatggaatggaatggaatggaatggaatggaatggaatggaatggaatggaatggaat

SEQ ID NO: 13 - DNA, 2986 bp, Homo sapiens
  repeat_region (1)..(2886): golem
  misc_feature (2326)..(2326): n is a, c, g or t
cagtcatgcgctgcataacgacgtttcggtcaacgatggaccacatatacgacggtggtcccataagattataatggagctgaaaaattcctatcgcctagtgacgttgtagtgcaacatatyactcaktactcacgcgtttgtggcgatgctggtgtaaacaaacctactgcgctgccagttgtataaaagtatagcacatacaattatgtacagtacataatacttgatagtgataataaatgactatgttactggtttatgtatttactatactatactttttattattattttagagtrtactccttctacttattaaaaaaaaaagttaactgtaaaacagtatgccgtgttagaccggcagcagccacatgcatctcgtgtttaccgcgtctcttgattgcatcattttctcttgtgcttgatttaatctcatgtgttttgttcatcacggctcctaagcgttcaaaatccacggctaatgttgccagtaagaggccacgtcgagtaattgagctggaaacaaaattaaaagtgattaaggaccgccgaaggtggaaaatcagtgatggttattgctcgccagacaggtatgtcccattcgaccatagctgccaccttgaagaacaagagcaaagtgacagaaactgttaaagggtctgcttcatcgaaggcgacgagaccaacaaatttgagaagtgccaacatcagatatggagaatatctgctaatgacctggattgaaaaccagacacagaaacatagctctctcagcaccacgacgaccacggccagagcaaaagggatatttttgatgttgaaagaaaaggctggacccgactgtgatatcgaatttactgctagttccgggtggtttaaatgattcgagaatcgttatccattacataatgttaacgtgactgctgagtctgtgagggctgacgtgaaggcagctgaagagtttttggaaactctagatgagtcgtggagaagaaatacttgccagagcaaatcttcaatatggaggaaacctccctattctggaaacagatgcctgaaaggactttctgtcataagggggccaagtcaatgccaggtttcaagggttttaaggacaggaaacggtcttgctttggggcaatgttgcaggctacaaattgaagccctttgtgatccgacacagtgaaaaccccagggccttcaagcatatcagtaagcacacgctgccagtgtactacaggagcaataaaaagtcatggatgatccatctcctcttccaagatgccctcctgaattgctatgccagagaaatggagaagtactgtttggggaataacatacctttcaagattttgcttattgttgataatgctcctgcacatcttccttttactggtgatcttcatcccaatttcaaagtggtgtttctctctccaaacaccacctctttgatccaatggatcaaggaattatagcagctttttaaaggcctactaccagagaagggccttcgcccaggttatcactgtaactgaggaagacactgatgcaattctggaaggattacaacagccaagactgcatcaagaaccttgcttgggattggggtgatgtcaccaaggagtgtatgaatggcatctggaagaagacactcaagaggtttgtccatgacttcaaaggatttgccaaggatgaggaggttgcaaaaatcaacaaggctgtggttgagatggcaaacaactttaacctgggtgtggatgaggatgacattgaggagctcctagaggtggttcctgaggaattgactaatgaggagttgttggaactggaacaggaatgcatagctgaagaagaggcaagagaaaaggaaactgcaggagaagaagaagaacccccaagaaaattcacagtaaagggtttagcagaagcttttgcagacctcaacaagctccttaaaaagtttgaaaacatggaccccaacaccgaaaggttttcattaatagagaggaatgttcatggtgcattatctgcttacaagcaaatctatgatgacaaaaagaaacaaaccaagcaaaccatcatggacatatatttctgaaaagagtgacacctcctcaagaagagcctcaggcaggtccttcaggagatattccagaagaargcatcgttatcataggagatgacagctccatgcatgttattgcccctgaagaccttccagtgggacaaaatgtggaggcggaagacagtgatattratgatcctgaccctgtgtaggcctaggctaatgtgtgtgtttgtgtcttagtttttaacaaaaatnttttaaaaaataaaaaaatwaaaaatttwwaaatagaaaaaagcttatagaataaggatataaagaaagaaaatatttttgtacagctgtacaatgtgtttgtgttttaagctaagtgttattacaaaagagtcaaaagttaaaaatgcaaaagtttataaagtaaaaaagttacagtaagctatggttaatttattgctgaaaaarwwwwwwwwwwwwwataaawttagtatagcctaagtgtacagtgtttataaagtctacagtagtgtacagtaatgtcctaggccttcacattcactcaccactcactcactgactcacccagagcaacttccagtcctgcaagctccattcatggtaagtgcyctatacaggtgtaccattttttatcttttataccgtatttttactgtaccttttctatgtttagatacacaaatacttaccattgtgttacaattgcctacagtattcagtacagtaacatgctgtacaggtttgtagcctaggagcaataggctataccayatagcctaggtgtgtagtaggctataccatctaggtttgtgtaagtacactctatgatgttcgcacaacgaaattgcctaatgacgcatttctcagaacgtatccccgtcgttaagcgacgcatgactg

SEQ ID NO: 14 - DNA, 335 bp, Homo sapiens
  repeat_region (1)..(335): golem_a
cagtcatgcgctgcataacgacgtttcggtcaacgatggaccacatatacgacggtggtcccataagattataataccgtatttttactgtaccttttctatgtttagatacacaaatacttaccattgtgttacaattgcctacagtattcagtacagtaacatgctgtacaggtttgtagcctaggagcaataggctataccayatagcctaggtgtgtagtaggctataccatctaggtttgtgtaagtacactctatgatgttcgcacaacgaaattgcctaatgacgcatttctcagaacgtatccccgtcgttaagcgacgcatgactg

SEQ ID NO: 15 - DNA, 1205 bp, Homo sapiens
  repeat_region (1)..(1205): golem_b
  misc_feature (347)..(347): n is a, c, g or t
  misc_feature (545)..(545): n is a, c, g or t
cagtcatgcgctgcataacgacgtttcggtcaacgatggaccacatatacgacggtggtcccataagattataatggagctgaaaaattcctatcgcctagtgacgttgtagtgcaacatatyactcaktactcacgcgtttgtggcgatgctggtgtaaacaaacctactgcgctgccagttgtataaaagtatagcacatacaattatgtacagtacataatacttgatagtgataataaatgactatgttactggtttatgtatttactatactatactttttattattattttagagtrtactccttctacttattaaaaaaaaaagttaactgtaaaacagnctcaggcaggtccttcaggagatattccagaagaargcatcgttatcataggagatgacagctccatgcatgttattgcccctgaagaccttccagtgggacaaaatgtggaggcggaagacagtgatattratgatcctgaccctgtgtaggcctaggctaatgtgtgtgtttgtgtcttagtttttaacaaaaatnttttaaaaaataaaaaaatwaaaaatttwwaaatagaaaaaagcttatagaataaggatataaagaaagaaaatatttttgtacagctgtacaatgtgtttgtgttttaagctaagtgttattacaaaagagtcaaaagttaaaaatgcaaaagtttataaagtaaaaaagttacagtaagctatggttaatttattgctgaaaaarwwwwwwwwwwwwwataaawttagtatagcctaagtgtacagtgtttataaagtctacagtagtgtacagtaatgtcctaggccttcacattcactcaccactcactcactgactcacccagagcaacttccagtcctgcaagctccattcatggtaagtgcyctatacaggtgtaccattttttatcttttataccgtatttttactgtaccttttctatgtttagatacacaaatacttaccattgtgttacaattgcctacagtattcagtacagtaacatgctgtacaggtttgtagcctaggagcaataggctataccayatagcctaggtgtgtagtaggctataccatctaggtttgtgtaagtacactctatgatgttcgcacaacgaaattgcctaatgacgcatttctcagaacgtatccccgtcgttaagcgacgcatgactg

SEQ ID NO: 16 - DNA, 704 bp, Homo sapiens
  repeat_region (1)..(704): gsat
  misc_feature (113)..(113): n is a, c, g or t
  misc_feature (268)..(268): n is a, c, g or t
  misc_feature (417)..(417): n is a, c, g or t
  misc_feature (449)..(449): n is a, c, g or t
  misc_feature (453)..(453): n is a, c, g or t
  misc_feature (466)..(466): n is a, c, g or t
  misc_feature (493)..(493): n is a, c, g or t
  misc_feature (547)..(547): n is a, c, g or t
  misc_feature (555)..(555): n is a, c, g or t
  misc_feature (597)..(597): n is a, c, g or t
gaattctgggagccttccaaggagggctttctcatcccagacgcccccatatctgttccgggcaggctataaagcccaaggctttggagcagggtgcctgtttctctccaaantcgcatgactgcaggtcgactctagaggatccccggcggaaggcccgacaagagaaacccgggccgcaggtggcgttggcgggccgaaggtactcaggatgacgttaaggcaggaagaggagagccacggtgagatcgcagagaatggtcagagncctccctagaaggccctctcccattccagaagccccccaggactttcccaggcagtgctgtaaagccaccaagctttggagccaaggtgactgtgtctcttgaggaagggcccgccacaaccaaaaacgttgcccgcctgatggcgtgnctggcctgcagggactcagggggatgtggagncagncagaaaggagaancaacgagactgcaggaaatgctaggancctcccaagaaggactttcttatcccaggagtttcaagggctgtcctggtcggnctgtaaanccccaggccttggaacagggtgcctgtgtctctcattgaagnccccaacaagagaaaacggtgctgcagggtggcgtgcgctggccgcagggactcaggaggatgttgagggagacagaggggtgaagcgttgagacgactgggaattc

SEQ ID NO: 17 - DNA, 1205 bp, Homo sapiens
  repeat_region (1)..(1205): gsatx
  misc_feature (34)..(34): n is a, c, g or t
  misc_feature (51)..(51): n is a, c, g or t
  misc_feature (380)..(380): n is a, c, g or t
  misc_feature (415)..(415): n is a, c, g or t
  misc_feature (459)..(459): n is a, c, g or t
  misc_feature (522)..(522): n is a, c, g or t
  misc_feature (553)..(553): n is a, c, g or t
  misc_feature (864)..(864): n is a, c, g or t
  misc_feature (975)..(975): n is a, c, g or t
  misc_feature (1017)..(1017): n is a, c, g or t
gaattccggatccaagtctactcttcagccttgntgattttttccttgggntgcctcaacctccccctgaaagtctggtgtcctgtaactgttcccctagggatatcttcccactttggggtgccccccatgggagaaacacacacccttggtgaaagccagggactccacgacccccttgggcccggctctggaactgctggaaaggcactggtctctggtagagtacaccagcctcctattcggactcgccacttttttcctccagctgcctcaatgtcaccctgaaatcctggcatcgtgaccacgtccctcggggacttcttgtcatgttgggcgggccgcctgtggggacagacacacacaccctgtgtgaaagnccaggggactccacaacccctgcagggcccagganaggagctgctgggaaggtactggcctccagtggaagacttcagncctccatttcagcctcgccgcttttttcctcaggctgcttcaacgtacccctgaaagcctggnatcctgtttcagtcactcgggatacttattnccactttggggagctcccccgtaggagagacatgcaccctgcatgcgtggcctgagaaaaaagtggtgaggacaaagaggagaccaggatgccccaccagaagacagcgctttcccggcagcccctgcgcatgacccaggtgggtggtggagtccctgaccccactaggggtgtgtgcctctcccacagaaggcaccacaaagcagcaagaagtcccccagggaacagagaaaggcagccaggctttcagaggggaggtttgaggcaggcttgggacaaaatagggaaggccaaaagaggacgcctgggtnccttcgccagaggtcagtgccttcctggaagctcccgagcccgatctgggggagtcctgacgtccctggccctcatgcagggtgcgtgtctctgccacagaaggcaccttnatgccgcaagaagtccccaggggacagagacaggcggccagnctttcagggggaggatgaagtaggcctgggacaaaagcggcgaggccaaacgaggtcagggtgccccacaggaggtcagggccctcctaacaacccctgcgcccaaaccgggggtgtcgtggagtccctggctcccaccaggggcacgtgtctctcccaccgaggacaccccaaagctgcaagaattc

SEQ ID NO: 18 - DNA, 2463 bp, Homo sapiens
  repeat_region (1)..(2463): hall
  misc_feature (391)..(391): n is a, c, g or t
  misc_feature (512)..(512): n is a, c, g or t
  misc_feature (645)..(645): n is a, c, g or t
  misc_feature (860)..(860): n is a, c, g or t
  misc_feature (881)..(881): n is a, c, g or t
  misc_feature (905)..(905): n is a, c, g or t
  misc_feature (907)..(907): n is a, c, g or t
  misc_feature (1252)..(1252): n is a, c, g or t
  misc_feature (1337)..(1337): n is a, c, g or t
  misc_feature (1392)..(1392): n is a, c, g or t
  misc_feature (1832)..(1832): n is a, c, g or t
  misc_feature (1881)..(1881): n is a, c, g or t
  misc_feature (1885)..(1885): n is a, c, g or t
  misc_feature (1935)..(1935): n is a, c, g or t
  misc_feature (2159)..(2159): n is a, c, g or t
  misc_feature (2161)..(2161): n is a, c, g or t
  misc_feature (2174)..(2174): n is a, c, g or t
  misc_feature (2334)..(2334): n is a, c, g or t
  misc_feature (2348)..(2348): n is a, c, g or t
  misc_feature (2350)..(2350): n is a, c, g or t
  misc_feature (2438)..(2438): n is a, c, g or t
  misc_feature (2442)..(2442): n is a, c, g or t
  misc_feature (2454)..(2454): n is a, c, g or t
aagatggcagattgaacatatacatttatttttctccctcccaaaaccccactaaaatgacaataaaggaattttttaaaagacataaacccacaaggacaaagagaacaggagaggagacaatagcaacaaaattttggaagctggaaagcagatggataagtggtaactgacttagcagacctgagaaagctgaatcctaagccagcagtggggaaagccaagaagcaacccaatttacaccgccagaatcctccccaaaaggctcaggaattggtggcaccaggtacctctggaagtgggggtgaaggtgaggctaaaaacagggaggattgattgaaagtctgtttaagaagcagttagatccccagattccctcccccactctatngcagccagataactgatcctcctccaccctagcagaagactggaggtttattctctggagaggataaaacaaaggggtctctggactggggaacaccaggcacagttgagggcagaggggnactgtactgaaaacaggggaattaagtgaaagtttacatactgaatgttgagactcccagccctcttcccccattcagctcccagaatgctggcagccaggcctataccctccagacaggagattagaagagntcttctctggagaatctgaccagcccaagagaaaagacttaaaaatactgataatagaggttccccaaacaaaatagcccagccagatcacccctatagtgaagcccacmacctggcaagccccacccacgcactcagagcttccaagtcgctttttagtstcccactcttaaatatgagcagacagccaaggatcaccagacatctgaggaaancctctaatatggcagacaganaaataaaaacagagaaaaacawwntntatccatgaaacaagaayaggatgctataaaaaggaacattcagagaacaaaaagaagctcttggaaattaaaaacgtgagagcagaaattaaaatttcaatagaagggttggaagataaagttgaggaaatctcccagaaagtagaacaaacaaaggataaagatacggaaaataggagagaaaagaattaaaaaaattgaggatcagtccaggaggtccaacatccaactaatagaagttccagaaagagagaacagagaaaaagatggaagagaaattatcaaagaaataattcaagaaaatttcccagaactgaaggacatgaatttccagattgaaaggncccaccgagtgcttaccgcaaaaatgaaggaaaaaaatagacccacaccaaggcacatcattgtgaaatttcagaacactgaganaaaaggaaaatcccaaaagcttccagagagaaaaaaaggtcacatacaaaggatnagaatcagaatggcatyagacttctcaacagcaacactggaagctagaagacaatggagcaatgccttcaaaattctgagggaaaatgatttycaacctagaattctatacccagccaaactatcaatcaagtgtgagggtagaataaagacattttcagacatgcaagatctcaaaaaatttacctcccatgcaccctttctcaggaagctactggaggatgtgctccaccaaaacgagggagtaaaccaagaaagaggaagacatgggatccaggaaacaggggatccaacacaggagagaggtaaagggaattcccaggatgatggtgaagggaaattccaggatgacagctgtgcagcaggcctagagagcaaccagtccagattggagcaggaagatggaaggctccaggaggaatgttctcaagaaaatagaanacaaatgaaactgatagattatctgatgtgtttgaatatattgagaggntatnatttagwcatgtgaaagtttgggggagaattgaattagtgataggtacanagaaaactaagcaaatgaaaaaaagcaagacaattattaactccagggaaaacaaaaagttgtacaagaaaggaaatgtaatcatagtacactacatggctcagctgtgaataacatatttacatagtcataataatgtaaacactraatactgatttaaccaaaattatgatataaactatattgggaggataagaaatggaaagggtgtgcgtatkgtgtangnggaatgaragaantaaatcctcatcttccatagtaggaagtcartagataatgtctaaaactgaaaaatcaagaaatagcaatataagcatgttatttagaaatatggaggtaaatattccaaaagaatcagctaaaagagttgaaagtggttgcctctggggaaggagctgnaggtggtgaagagngnagggacggggaaytgctgttttttataagccttttagtactatttgaccttttaaactatatacatrtattactttaatttaaaaaantaanttataaaaaagnaaataagta

SEQ ID NO: 19 - DNA, 8735 bp, Homo sapiens
  repeat_region (1)..(8735): herv15i
tttctggtggcccagatggggattggagacgacagatttactgtctcctttgcctgtgggactagagccccggggccgggggagacccggcatccaaggcgtgccacgggggagcttcacccggacggagaccggctctccccgcatcccggcggcctgcccggcagtgcaacggaaccggggatggggctgcaggacgataccagcacttcaggaaccgcggtaaggagcaagggcccaaggcaggaaagcccatcccatagggacgaaggggagcttgatcacctcccagggaccgaccactaatccaacccagagtggctgggggtggcaggagtggcctgccaatttggatgaacctcgtgtccccctaacaagtgaaagtggttcactggtggagaaaatgggccgatagagcggcaagtccagcaaggaagagcttgctggcagggtggcaagagtggcttgccaccccaactgggagtgtgtgggtgtgtgtggacctacccaggacatgagagaggctcgtttcgtccgatgaggagtcctggggtaggagtggtgtgtgtatgtgtgtgaatgtgggagcctaactaggctcacccgggacacgggagaggcctgtttcgtccgatgaggagtcctggggcaggraaggtgtgtgaaagagacggtctcgggagaggccaatgcggggagtaatgtggggaggcacagatcccttagcgcgggctgtgtgctccgaggcgagtgtgggggaaatcagacctaggacgttgcatatggctgataggaccagcttcacggccgcagcaggctgtgacaggggaaggcacattcctggctaagcagtgtccgaaactcccgtaataggacccggtctggtggacctgagagtgaaagtgagagggaaagtgcaccacaagggaggaaatgggaggaaaagcatcgaaaccaactcctttggagtgcatgataaagaattttaaaaaaggatttagaggtgattatgggatgaaactggatgctcaaaagttaaggacatactgtgaaatagattggcctgcttttaatgtggggtggccctctgaaggtacaatagacagggaattaattggccgtgtgtttaaggtggtcactggagttggaggacaaccaggatatccagaccagtttccctatatagactcttggctcagtgtggcacaaactcaccccaagtggctacagccctgcctagagggatattgcaaggcattagtggctcaggcagcccaaccaaaggaagcagaggaacctaaagcccctagagtctctcaggaaaaggaatccctgaagcctcagctgaaaccagttcttcaggctccacctgaggaaagggaatgtccgcccccatatatgtgccagtctacctgtctttggccagaataaggcaggaggcagagtcaggagcatccacagagtcaggctgagaggaaagtgaggcccagtctcccccaaccccagaggaacaaaagcctcccttagaaaaaaaccaggaagatggacagagcaaggcagctgggtgcctccgctcaggctgaccacaggctttgcagatgccacttcgagagaacaggacacaagtttatgatgaccaagggcagatacaaggaggctctaggctttatgtttatcagcctttctccactactgatctcttaaattggaaacagcacgcccccttgtatgcagaaaagcctcaggctgtcattgatttggtgaattctattattataacacaaaacccaacctggccagattgtcaactacttttgctaactttaatacagaggagcataggagagttaatcaggcagctctcagctggttagaaggggaagccccagaggccacccgtaacccatgccagttctccgtggagcgatacccaaatgaggaccctaactgggacccaaatgaggcaggggacatggaacagctgcattatatagaagggcactcctgaacaggataaaagcaggaggaaggaaggcattgaatatccataacatatcagaagtgggccaaaagcctgacgaaagccgcagtgcattctatgaaaggctttgtgaggcatagaggctgtacactccaattattccagaggctcctgaaaaccaaaatatgataaatatgacctttgtcaggcaagctcagggagacataatacgaaagcttcagaagttggaaggcttttcagggaaaaatattagtaaactcctggaaatagcaaacaaagtattaaaaaactgggaagaagaggcagagaaaaaggaagaaagaaaaacgagaaatagaaacaaagagacagctcaatttctgctgcactagcagaaagtaaccctggatttgctagagggcgtggccgaggcagaggccaaggaacagggcagacaagacccggagatgaaagccagtcccagttggacaggaatcaatgtgaaaggtgcaggcaaatgggccactggaaagatgagtgccccgaaaaggaaaaggatgatgatggtcagtggtctaacacccaagtgcggtgttaggttgctagcagtggtacttccaaggcagatcccgatctgatcggcttggcaggggccgagaatttagaggactcagacagaccaggctccatccttttaggccttgtggagcctatggtctctatggaagtagggggccgattaatgaatggattttttggtcaatactggtgctgatttctctgtggtaactcacccaattagccccccctcaaagaactgtgctactatcgtaggggctacagaggccaaagaaaagagacctttttgcaattccaggagatacgttattgggggacaagaagtgcagcatgagtttctatatatgccaaattgtccagtgcccttgttggggagagacttactccagaaactgcaggcacaaatttcctttacacctgaagggaatacgacaccggaatttggaaagtctaaggcaatggtattgattctaactgtcccagaggctgaggaatggcagctctctgaactgtgtgccagaaggataccggagctggacctacacagtatgtagggaatgcttttcaaggttccaggtgtatgggctgaggacaatcctcctggacttgctgtaaacagacacccagtggtaatagagcttaacactcatgctgccctggtatgagtctgtcaatacccactacccaaagaggtaattgaaggcataacacaacatctaaatcggctctatgaacaagggattatagtaaaatgcaagtcctcttggaatactcctctgcagcctgtgcacaagccaaatggtgaatacaggccagtgcaggacttctgggtggcaaacaaggccactgtcactatctatgccatagtacccaacccatacaccatgttaggacagattcctgctgaggccatgtggttcatgtgtctagacttaaaggatgttttctttgcttgagacttgctccccaaagtcagcctatatttgccttccagtgggggcaattgtaatatacctggacaagactgccacaaggatttaagaattctcccattatctttgaggacgctttggctaccaaccttgaagcttttgcaccatttagtgacaattctgtggtattacaatacattcatgatttgctattcgctgcccccaggagggaggaatatctccaaggaatagagaggcttcttcacctgctgtgtgaagctggttacaaagtgtccaaggacaaggcaaaagtctgttttctggaggttggatatctaggattcatggtatcccaaagcctgcacaggcttggaagtgcatgcaaggaggctttatgtgcattgcccacctcagttacaaggcagcaggtcagggaatttctgggtgcagtgggattgtgccgaatctggattccaaacttctcccttatagcaaggcccttatttgaggctagcaaaggaaaggaaagagagcccctcctatgggaaaaagaacaggaaaaggccttcaaggatataaaggaagctctcatccaggccccagcactagggttgccagatgttaaaaaacccttctttttgtatgtggatgaatgaaagggaatggtatttggagtcttaactcagttgttaggctcttggcatcagccagtagcatacttttatccaagagactggacttggtggccttaggttggccccattgcctcagggcactggcagctaccgcgatccttatagaagatgccaacaagctagccctaggtcagaagataatattccgggtgccacacactgtagtcaccttaatggagcaaagaggacgtcgttggctgtcccactctagaatgctaaagtatcaagggcttctgtgtgagaatctgcgggtaacactacagactaaataccttgaacccagctaccctgctgcctgtggaggaacccgattggaagcatggtgggttgcctcaatgctggcaggaccttccccactgttgcataaatatggtggatgaagtgttcttgagctgggaagatctcagagatacccccttggagagcccagatgttgaatacttcactgatggtagcagtttcataacagatggggtgtgatatgcagggtatgcagtagtaacacaacactcagtagttgaggctcaagccttaccttctgggacttccgctcagaaggctgaattaatagcattaaccagagcactgttattggccaagaggaagaaagtaaatatatatactgactcaagatatgcttttgcaaccctgcatgcccatggggcaatataaaaagagagaggactattgactactgaaggaaaagatataaaaaataaagaagaaattttgcaattattagaagacatatgggctccagagaaggtggctgtcattcattgcaaagggcaccaaatcaggaaaagctatgaggcacagggcaacagaaaggcagaccaagaggctcagcaggcagcaatgagcaaggttttacctgaagaaagaactccagcaatgcctctccttatagagccccctttactggaggtacccaattactcttcaagtgaaaaagcttgttttcatcaggaaacaggaaacatatattaaagatggttggtggctgttctctgacgggaggctagccatcccagaaacaatagccccaaggtttgtgaagcagatccatcaaggaacacacattggaaggacggccctagagactttgataggtcagcatttctatgtgccatggctgtctgccatcacccatgctgtttgtgaacaatgtctatcctgtgtccggaataatccaaaacaaggacctactcgacccccaggaatacaggaaatgggagctgtgccttgtgagaacctgcttgtagactttaccgagttacctcgagcaggaggttaccggtatatgctagtgtttgtttgcaccttctcggggtgggttgaggccttccccaccaggactgaaaaggcacgagaggtgacaaaggtgctactaaaagacatcataccaagatttgggttgcctttaaccctaggatcagacaatggtcctgcatttgtggcagaagtagtacaacagttgactcaacttttaaagatcaaatggaaactgcacacagcctactgaccacagagttcagggaaggcgraacggatgaaccagacactcaaacagctactaaaaaagttttgccaggaaactcacttacaatgggatcaggtcttgcccatggtcctcctccaggtcaggtgtacacctacaaaacaaactgggtatttgtcctatgaaatattgttcggaaggccacccccaatcattaatcaaattagaggggatttaaaggagttaggagagttaacccttaagagacagatgcaggctttaggagtggcaatgcaggaggtgcaaagctrggtaagagaaaggatacctataagtctaacagacccagtgcatccacataagccgggggactctgtctgggttaaaaggtggaatccaacaaccttgggacccttatgggatgggccccatattgtaatcatgtctactcccactgctcttaaagttgcaggtgtcacaccttggattcaccatagctggctgaaaccagcggcagcagtgactcccgatgacgaccagtggattagccaacaagacccagatcgccccacctgaatagtcctacggcgaaacccaaccaccggtaagaaggacaactgccctgctccgaccacaccggaggctggtcagtctacgcatggctgaagcttgaagatcctgcaagctctgctctagtcacatcccggaagctgactagtcaatgcacagccgaagctaagaggaccatctctggataagtaaatgtggatacaattcataaccctagttataattctgttaatactgattgttctgttgttacgttaccactgcaaatgctgcaaatgtctatgcccagagggaggtttgccatgcccatgtgtagtgtaagcatgtttctattacatacactgatgttgttaccatttctgcctatactaaaaggggaggaatctctagaaagatgcccacactgtgtacatactacctgggtaaggaataccatagttaaaactctactgtaccatacctacagtacaggaaccaagttaggaacctgcgcatacaaccagaccacctcttcagtctgtgacccaggaaataatcagctacatgcatgttatgaccctaagcgcttaccctatgaattctggtttgaggtacatattaaatcagagggagaaaaagaaggagagcttatagctcgaaccaaagaagcccctccctcctataaaaggcctatttccttgtactttgatgcctgccatgccgcatatgttcataatcctaaaaaaccaaaagcagtctgcaatggtttaacacaagagaggcttagcaggagcagccctaaacatctgtactgagaaccacaaattggatgcccagactgtaacattcagtggtctatgctaacacagctccaacacttatattcaggaaggactgctctgctaagtagtatgtcagccaaaccaaattgtaagacaaggacatgcaatcctttaaattttactatcttaaagccagagctacctttctggtctacaggacagacagcactattacgagttgatagacaaggagcaggccttggagttccactactaattgtcaaaaagactagaaggactcaaatgtgtccaaccctgcaattctgggtccataagtcattctgtaagcattttgatcagtcagtgcctgagcttcccctatcaaccaaaaacttatttgctcaactagctgaaaacatagctggcagcttaggaatttcctcatgctatgtacgtggaggaactaatatggggaaccagtggccatgggaggcaaaggaattaatgccacaagataacttcacttcgcctaaccctgccagtgaaccaacagcctcagccagtgtttggttgttaaaaacctccataattggaaagtactgtatcgcccgttggggaaaggctttcacagaggcagtaggagaaacaacctgcctagggcaacagtattatgatgagactaaaaacaaaactctatggagaaacacccagaattactcctacttaccagatccaaatcctttctcttgattctctaccctaagccacacttggcatcagctagaggttccaaatgcttggaaagcaccctctggcctatattgggtctgtggagcatgggcatatcggcaactgctggctaaatggacaggggcatgtgtgttagaaacaatcaagccatccctctttttaattcctctaaagcaaggggaactcttagggtatccagtttatgatgaaaataaaagaactagaaaaagcataatcacaaaaatagacacaaatgtcaaaaaggatgcagacataggagactggaaggataatgaatggcctcctgaaagaatcattaaatagtatgggcccgctatctgagcgcaagttgggtcatgggaataccgcaccccaatctatatgctcaaccgcatcataaggttgcaggcagtccttgaaataataaccaatgaaatgtcaaggaaactagatttattgataacacaagcaacacaaatgagaaatgctacatatcagaatagattggctttagattacctcttagcctcagaaggaggagtatgtggaaaatttaatttaaccagttgttgcctagaaatggatgataatggccaagctctaatggaaaccacagctagaatgtccaagttggcccatgttccagttcagacttggtctggatggtccctggattccttgtttggaggatggttctcaatgtttgggggattcaaaaccctcattggtgggtttttgtttattcttggcatctgcctcatcctcccttgccttttacccctgtatattaggagtatttgtcaactatagaggcagtagtaacccgaaacactaccatgctattgacggcattaaccaaatatcagccactgccaataaaagaaacagctcagctccgggaagagatggcaaatagtggtgctttctattaacatctttgttttaaaaagcaccaaaggggggaaa

SEQ ID NO: 20 - DNA, 4996 bp, Homo sapiens
  repeat_region (1)..(3596): herv16
  misc_feature (71)..(71): n is a, c, g or t
  misc_feature (99)..(99): n is a, c, g or t
  misc_feature (252)..(253): n is a, c, g or t
  misc_feature (421)..(421): n is a, c, g or t
  misc_feature (516)..(516): n is a, c, g or t
  misc_feature (677)..(677): n is a, c, g or t
  misc_feature (712)..(712): n is a, c, g or t
  misc_feature (812)..(812): n is a, c, g or t
  misc_feature (1249)..(1249): n is a, c, g or t
  misc_feature (1424)..(1424): n is a, c, g or t
  misc_feature (1496)..(1496): n is a, c, g or t
  misc_feature (1522)..(1522): n is a, c, g or t
  misc_feature (1565)..(1566): n is a, c, g or t
  misc_feature (1683)..(1684): n is a, c, g or t
  misc_feature (1845)..(1845): n is a, c, g or t
  misc_feature (1951)..(1951): n is a, c, g or t
  misc_feature (2102)..(2102): n is a, c, g or t
  misc_feature (2108)..(2108): n is a, c, g or t
  misc_feature (2117)..(2117): n is a, c, g or t
  misc_feature (2274)..(2274): n is a, c, g or t
  misc_feature (2392)..(2392): n is a, c, g or t
  misc_feature (2459)..(2459): n is a, c, g or t
  misc_feature (2564)..(2564): n is a, c, g or t
  misc_feature (2568)..(2568): n is a, c, g or t
  misc_feature (2572)..(2572): n is a, c, g or t
  misc_feature (2628)..(2628): n is a, c, g or t
  misc_feature (2648)..(2648): n is a, c, g or t
  misc_feature (2654)..(2654): n is a, c, g or t
  misc_feature (2791)..(2791): n is a, c, g or t
  misc_feature (2809)..(2809): n is a, c, g or t
  misc_feature (2813)..(2814): n is a, c, g or t
  misc_feature (2926)..(2926): n is a, c, g or t
  misc_feature (2928)..(2928): n is a, c, g or t
  misc_feature (2930)..(2930): n is a, c, g or t
  misc_feature (2982)..(2982): n is a, c, g or t
  misc_feature (2988)..(2988): n is a, c, g or t
  misc_feature (2993)..(2993): n is a, c, g or t
  misc_feature (2995)..(2995): n is a, c, g or t
  misc_feature (2997)..(2997): n is a, c, g or t
  misc_feature (3004)..(3004): n is a, c, g or t
  misc_feature (3019)..(3019): n is a, c, g or t
  misc_feature (3075)..(3075): n is a, c, g or t
  misc_feature (3092)..(3092): n is a, c, g or t
  misc_feature (3097)..(3098): n is a, c, g or t
  misc_feature (3097)..(3130): n is a, c, g or t
gttggtaccaggagtggtccgagaaagcagacgmtgctaagatgkgattttggagttggatcacccgctgncwagctggcaatgaggactccatcacwngtggtaggtggagcatagatagcctctggcacaaggtagtagtgsaattgttaaaactttcactggtggtgaactgggatggcgtactggtgaaaagagaacgcactagctggtgcaatgcttcaggcgtttgagaaatatgggatgaattanntacatggaaggacartggaattggatggctgtcgctaagcttgactgacactctgkaaaagaacaataaaragctgagagcgattaattggcaattgaaaactaagcatgaaagccagagggcctctttggtagcatataaagaggctctcatctcctgcagcggganggcagagaaasctgaggatcagacccagaatttgatcaaagtagcaaagcttcaaagaaggttaaattcccaaccaaggcaggtcttctatgccnagktcagcgccccggttaggsaagaacgggaccctgacacacggratggggacgtctggattgatgcccctaaaaatcttgaatccccagattcccctgaaccctttgagcctgcagaagtgacctactcctccctattaagggctrgcattcgcttcttnctttatgggaagacagtacggaggcctctcccttngcaagacaacatgggttttccycaggatctgcctccacctcatctcctggccactaggccaataactagggttaartcacarcgtaacctggccggggangtgctgggcctgataaggaaagaaagggactataccccaaaggagttgcgggacatatctagccagcatatactagcaggaccgggagagtacsyacgggactggattctgaggacgcttgatcaagggggccggaacataaakttggataagggagagtttattgatttgggagcactctcccgggatacaggatttaacaccctggcgaggaccccaggagatggcgcaaacacactgctaggatggctcctagaagcatggagaaagcgatggctcacactaagtgaggtagaaatgccagaattgccatggcagatggtgaaaaaagggatcaaaaagctcagggaggtgggcatgctggaatggatatattatgtraggccagaagacccgccagaggattatgttstacaggaggactcaggggacgcacnatttaccaaagccataaggaatgtgctggwgagaggggcgccagcatcaccgagaagttcaatggtggctctcytctgcaggccagggttgataataggagaggcaatcacagagctgggctcgctgatagcagtcggggtgatagggctctgacgtaatagaggccaggtggtngcactcggccgtcagaagcaaggtggacgtaaataccacaatgcactgcagggtcggagtggcagtcggganggcctgacttgcggggagctatgganatggttaatagaacacagtgtccctagaggcgaaatagacggnnagccaacaggaagacatggacagtcaatgggacatggtgtcctatgggcaagagagatgggctgccaacaagggtgtattgttcaactgaagcaagcgaaagaaacgaagggtgtannactaggaggctgagggcggtcgccccaataaaaagtcatratcccttgcccagtttccagatctgagccagttttcagacctagaacccattgactgaaggagaggccgggtccccaggaggaaggaccccgcaacaccacggcaagtgtacatcgtaatnatttctccagtccttccccaargggacctgtrgccatttactctgggtaactatgcaccggggaaagagaaatacccggacatttcgaggactattggacactggntctgagttgacattgatacccggagacctaaagtgtcatcatggtcctcccgttagaatgggggywtatgggggycaggtaataaatggaatcctggcccaagtctggctcacagtgggtccactgagttcacagacccacagtggttatntctctnatccctgantgtataattgggatatacatacttggtagttggcacaacccctacattggktccttggcctgcggggtgagagctatcatagtggagaaggccaagtggaagcttccgaaactgccctcaccttctccgggcaagacagtaaatcaaaaacaatatngcatcctcggggtggagaatggcagaaattattgccaccwttaaagacctaaaggatgcaagaggtgtggtctccatcatatcttcgtttaattcgccagtgcaaacccctgcaaaanctagacggatcctggatgacggtagcgggctaccacaaactcagccaagtagtatcccaattgcaantgctataccagacgtggtatcttcgctacagcagattaacatggcctcaagtatgtggtktgtagctattgatktggtaaatgtattcttttccatctctgtcanaaanaacnatcagaagcagtttgcattcactcggaacggacaacagtatacatatacagttttncctcagggcactactaactntcatgncctctgtcataatatagtctgaaggggtctgaaccacttggacatcctacagaacatcacattggtccactatgttgatgacatcatgctaattggaccggaataagcaggaagtggctagtacattggaggccttngtaagrcacatgcgctcnaganngtggaagataaaccctacgaaaatccgggagcttgccacatcaatgaartttttaggggtccagtggtctgkggcatgccggaatatccccccaaagtaaaggacgaattantntntcttgtaccttccaccacgaagaaggaagcgcaatgcctggtaggcctcttngggttntggananancatattncacacttgggaatantgttccgacccatatactgggtgacgcgaaaagctgccagctttgagtggggcccnagcaggaaagggctctntggcnnnnnnnnnnnnnnnnnnnnnnnnnnnnnnnnnncctctaagtcataaagtaagatgaatccagcagtagcccataatacggtggaaacagaatatcctagattaagtccgaggaaaaccagaggacacaggttaggtatatgagcagatagcccagatccccatgctatccaccacagttgcaccagtgcctctcctttggtttgaacctatagccatattaaagtatgtggtcccatataaccagttgaaggaaagctcaagcttggtttacaggatcagcttggtatgtgaacgtaagtcaaaatacgtggtgactgtattacagccccatttagaggtggtcctgaaaggcagcagggagtgaaaatattttcccagtgggtagaactgcaagcagtgcacctgattatccactttttgtggaaaaagaagtggtccaagatggtaatatatatgcattattggacagtagccaaaggtctggtgagctggtcaggagcttggaaggaaaagatcagagaaagggaagtctagagtagaggcatgtggatagacatattggaagtgatatgaaataggaagatttttgtatcaatcctattttaatgttcacatgaaagcatcaattgtgaaagagtaactgaagaactaagtagacaaagcgactttgaccactgacattaaccagcattcattctggccttctcaggactggtccaatagacatctcaaagaactagccatggcagaagaaatggaggtaatatatgggcccaatatcacagactcctgtgtaccaagacaatttagctgcttccctgtatgaatatccaacctgcagcaacagcgaccaaggctctatctcaaatacgacactatttatgaagaccacttagcagtgaattgactatattgtatgctttttatcctggaacagtcagtggttcatgctcacagaactatgtacctattctgggtatggatttgccttttctgcctgcacagcctcattaagcatctgagggatttgggggttcttgagccatagtctcggaatcccacacaacagagcatctggacagggtagtcacttcatagtaaagaaggggcacaaatgggtccagaacaagaggatccacttatcatatcaaatactgcaccatccagaaggagctgacctcacagaacacttctgaaggcaaagataaagcaccaataaaagtaaaccctgaaaaaattgggtgccgttctccaggatgcagtgtatacattaaatcacagacctatacgttaggctttagatctaattggaagaatgggattaggaataagaggtgaaagcaggagtgtgcctactccccatcgtagtggcccacaaggatcacagcagtggtttgaacacggattggactactgatatccaggaatcgccgcacaagaaggggaatccacatgtggcaggagtaattgactatgatgtgtaggaggggtagggctgctttagtaaaatgagtaagaaaggaatacatatgaaaccaggtgatctacttgagtgcctcctggtattctcttgcttcatttaactgtgaatggataatgtcattgaaaagagtttggacacctccacaatgaaagtttggttcacatggctaagtaagcttccaagacttgtcaaaataataactgtgtgagggacatttcaaataggtagtggaaaaggaagataataattaccagttctggcccagaaactaaatgcagcaaggggggctgtagtgtgtcccactatcctccctcttcaaagtttggcttcataaagagaagcttaaaggaataaggaaggaactgttccatgaacctgaatggagaaatagatctgtcgagtacaaaggtggac

SEQ ID NO: 21 - DNA, 8523 bp, Homo sapiens
  repeat_region (1)..(8523): herv17
ttttggcaaccacgaacggacatccaaagtggtgagtaatattggaccactttcacttgctattctgtcctatccttccttagaattggaggaaaataccgggcacttgtcggccagttaaaaacgattagtgtggccaccggacttaagactcaggtgtgaggctatctggggaagggctttctaacaacccccaacccttctgggttggggacttggtttgcctcaagccagcttccactttcagttttcttggggaagccgagggccgactagaggcagaaagctgtcgtcctgaactcccggcagtagccggttgagatcatggtgtagccagaagtctcaacagtcgcccatgcatgcacccctatctttccttctgacccatacctcctgggtcccaaccacaactttcttcaaagtgtagccccaaaattctccttacctctgaatatacttcctctgatccctgcctcctaggtactattggttcagacttccatttcctctagcaagttgtatctccaaagggatctaaggaagctctgcgctgcgtccttaggcacctaggctataacccagggagtcttatccctggtgtccctcccaatttaggcatacagctcttgacatgggcagttatgtaggacccactccccaccacccttgccagggccccaagtttgtaaatggctgagggaaaagagagacagaggagagagagagaaatggaggagaaagagagagagacagagaggagagagagacagtgagagagacagaagagagagagagacaaagaggagagagagagagtcaaagagagaaagaaagagaaagaaatagtaaaaaacagtgtgccctattcctttaaaagccagggtaaatttaaaacctgtacttgataattgaaggtcttctctgtgaccctatagcactccaatccactttgtggtcagtgtaaataagagcataggccgaaagcactgaggccattgacaacccgtagcttccctatcaaaaatccttaacccagtaacccgcagatggaccaaatgcattcagtcggtagcgcaactgctttgctaaaagtagaaaagtaacttttagaggaaacctcattgtgagcacacctcacctgttcagaattattctaataaaaaaagcaaaaaggtagcttactaactcaaaaatcttaaagtatggggctattctgttagaaaaaggtaatgtaactccaaccactgataattcccttaacccagcagatttcctaacgggatttaaatcttaattaccatacaaaggtccgaccagacctaggcggaactcccttcaggacaggacgatagatggttcctcccaggtgattgaggaaaaaaaccacaatgggtattcagtaattgatacggggactcttgtggaagcagagttagaaaaattgcctaataactggtctcctcaaacgtgtgagctgtttgcactcagccaagccttaaagtacttacagaatcaaaagactatctcaatcctgattcaaaaggttagctacaccctctctgtaatgcatttgcataagaacttgtttatgggaatgcatcttgatggggcagctgggttgttataaaataggaacccagcccagctctagaactcacccctgagcacaaaggcaatgttgggcacgctggtaaaggaccactagaatccagcagcctggacccctttctttgtggtcaagagaggcaggaaaacaggtgcaggactgcaacatcagtgagcataactaattcgataagcagaggtccatgggtggtgatgcaccctggaaagaataagcattaggaccatagaggacactccaggactaaagctcatcggaaaatgactagggttgctggcatccctatgttcttttttcagatgggaaacgttccccgcaagacaaaaacgcccctaagacgtattctggagaattgggaccaatttgaccctcagacactaagaaagaaacgacttatattcttctgcagtgccgcctggcactcctgagggaagtataaattataacaccatcttacagctagacctcttttgtagaaaaggcaaatggagtgaagtgccataagtacaaactttcttttcattaagagacaactcacaattatgtaaaaagtgtgatttatgccctacaggaagccttcagagtctacctccctatcccagcatccccgactccttccccaactaataaggaccccccttcaacccaaatggtccaaaaggagatagacaaaagggtaaacagtgaaccaaagagtgccaatattccccaattatgacccctccaagcagtgggaggaagagaattcggcccagccagagtgcatgtgcctttttctctcccagacttaaagcaaataaaaacagacttaggtaaattctcagataaccctgatggctatattgatgttttacaagggttaggacaattctttgatctgacatggagagatataatgtcactgctaaatcagacactaaccccaaatgagagaagtgccaccataactgcagcctgagagtttggcgatctctggtatctcagtcaggtcaatgataggatgacaacagaggaaagagaatgattccccacaggccagcaggcagttcccagtctagaccctcattgggacacagaatcagaacatggagattggtgctgcagacatttgctaacttgtgtgctagaaggactaaggaaaactaggaagaagtctatgaattactcaatgatgtccaccataacacagggaagggaagaaaatcctactgcctttctggagagactaagggaggcattgaggaagcgtgcctctctgtcacctgactcttctgaaggccaactaatcttaaagcgtaagtttatcactcagtcagctgcagacattagaaaaaaacttcaaaagtctgccgtaggcccggagcaaaacttagaaaccctattgaacttggcaacctcggttttttataatagagatcaggaggagcaggcggaacaggacaaacgggattaaaaaaaaggccaccgctttagtcatgaccctcaggcaagtggactttggaggctctggaaaagggaaaagctgggcaaattgaatgcctaatagggcttgcttccagtgcggtctacaaggacactttaaaaaagattgtccaagtagaagtaagccgccccctcgtccatgccccttatttcaagggaatcactggaaggcccactgccccaggggacaaaggtcctctgagtcagaagccactaaccagatgatccagcagcaggactgagggtgcctggggcaagcgccatcccatgccatcaccctcacagagccctgggtatgcttgaccattgagggccaggaggttgtctcctggacactggtgcggtcttcttagtcttactcttctgtcccggacaactgtcctccagatctgtcactatctgagggggtcctaagacgggcagtcactagatacttctcccagccactaagttatgactggggagctttattcttttcacatgcttttctaattatgcttgaaagccccactaccttgttagggagagacattctagcaaaagcaggggccattatacacctgaacataggagaaggaacacccgtttgttgtcccctgcttgaggaaggaattaatcctgaagtctgggcaacagaaggacaatatggacgagcaaagaatgcccgtcctgttcaagttaaactaaaggattccacctcctttccctaccaaaggcagtaccccctcagacccaaggcccaacaaggactccaaaagattgttaaggacctaaaagcccaaggcctagtaaaaccatgcagtaacccctgcagtactccaattttaggagtacagaaacccaacagacagtggaggttagtgcaagatctcaggattatcaatgaggctgttgttcctctatagccagctgtacctagcccttatactctgctttcccaaataccagaggaagcagagtggtttacagtcctggaccttcaggatgccttcttctgcatccctgtacatcctgactctcaattcttgtttgcctttgaagatacttcaaacccaacatctcaactcacctggactattttaccccaagggttcagggatagtccccatctatttggccaggcattagcccaagacttgagccaatcctcatacctggacacttgtccttcggtaggtggatgatttacttttggccgcccattcagaaaccttgtgccatcaagccacccaagcgctcttcaatttcctcgctacctgtggctacatggtttccaaaccaaaggctcaactctgctcacagcaggttacttagggctaaaattatccaaaggcaccagggccctcagtgaggaacacatccagcctatactggcttatcctcatcccaaaaccctaaagcaactaaggggattccttggcgtaataggtttctgccgaaaatggattcccaggtatggcgaaatagccaggtcattaaatacactaattaaggaaactcagaaagccaatacccatttagtaagatggacaactgaagtagaagtggctttccaggccctaacccaagccccagtgttaagtttgccaacagggcaagacttttcttcatatgtcacagaaaaaacaggaatagctctaggagtccttacacagatccgagggatgagcttgcaacctgtggcatacctgactaaggaaattgatgtagtggcaaagggttgacctcattgtttacgggtagtggtggcagtagcagtcttagtatctgaagcagttaaaataatacagggaagagatcttactgtgtggacatctcatgatgtgaatggcatactcactgctaaaggagacttgtggctgtcagacaactgtttacttaaatgtcaggctctattacttgaagggccagtgctgcgactgtgcacttgtgcaactcttaacccagccacatttcttccagacaatgaagaaaagataaaacataactgtcaacaagtaatttctcaaacctatgccactcgaggggaccttttagaggttcctttgactgatcccgacctcaacttgtatactgatggaagttcctttgtagaaaaaggacttcgaaaagtggggtatgcagtggtcagtgataatggaatacttgaaagtaatcccctcactccaggaactagtgctcagctagcagaactaatagccctcacttgggcactagaattaggagaagaaaaaagggcaaatatatatacagactctaaatatgcttacctagtcctccatgcccatgcagcaatatggaaagaaagggaattcctaacttctgagagaacacctatcaaacatcaggaagccattaggaaattattattggctgtacagaaacctaaagaggtggcagtcttacactgccggggtcatcagaaaggaaaggaaagggaaatagaagagaactgccaagcagatattgaagccaaaagagctgcaaggcaggaccctccattagaaatgcttataaaacaacccctagtatagggtaatcccctccgggaaaccaagccccagtactcagcaggagaaacagaatggggaacctcacgaggacagttttctcccctcgggacggctagccactgaagaagggaaaatacttttgcctgcaactatccaatggaaattacttaaaacccttcatcaaacctttcacttaggcatcgatagcacccatcagatggccaaatcattatttactggaccaggccttttcaaaactatcaagcagatagtcagggcctgtgaagtgtgccagagaaataatcccctgccttatcgccaagctccttcaggagaacaaagaacaggccattaccctggagaagactggcaactgattttacccacaagcccaaacctcagggatttcagtatctactagtctgggtagatactttcacgggttgggcagaggccttcccctgtaggacagaaaaggcccaagaggtaataaaggcactagttcatgaaataattcccagattcggacttccccgaggcttacagagtgacaatagccctgctttccaggccacagtaacccagggagtatcccaggcgttaggtatacgatatcacttacactgcgcctgaaggccacagtcctcagggaaggtcgagaaaatgaatgaaacactcaaaggacatctaaaaaagcaaacccaggaaacccacctcacatggcctgctctgttgcctatagccttaaaaagaatctgcaactttccccaaaaagcaggacttagcccatacgaaatgctgtatggaaggcccttcataaccaatgaccttgtgcttgacccaagacagccaacttagttgcagacatcacctccttagccaaatatcaacaagttcttaaaacattacaaggaacctatccctgagaagagggaaaagaactattccacccttgtgacatggtattagtcaagtcccttccctctaattccccatccctagatacatcctgggaaggaccctacccagtcattttatctaccccaactgcggttaaagtggctggagtggagtcttggatacatcacacttgagtcaaatcctggatactgccaaaggaacctgaaaatccaggagacaacgctagctattcctgtgaacctctagaggatttgcgcctgctcttcaaacaacaaccaggaggaaagtaactaaaatcataaatccccatggccctcccttatcatatttttctctttactgttcttttaccctctttcactctcactgcaccccctccatgccgctgtatgaccagtagctccccttaccaagagtttctatggagaatgcagcgtcccggaaatattgatgccccatcgtataggagtctttctaagggaacccccaccttcactgcccacacccatatgccccgcaactgctatcactctgccactctttgcatgcatgcaaatactcattattggacaggaaaaatgattaatcctagttgtcctggaggacttggagtcactgtctgttggacttacttcacccaaactggtatgtctgatgggggtggagttcaagatcaggcaagagaaaaacatgtaaaagaagtaatctcccaactcacccgggtacatggcacctctagcccctacaaaggactagatctctcaaaactacatgaaaccctccgtacccatactcgcctggtaagcctatttaataccaccctcactgggctccatgaggtctcggcccaaaaccctactaactgttggatatgcctccccctgaacttcaggccatatgtttcaatccctgtacctgaacaatggaacaacttcagcacagaaataaacaccacttccgttttagtaggacctcttgtttccaatctggaaataacccatacctcaaacctcacctgtgtaaaatttagcaatactacatacacaaccaactcccaatgcatcaggtgggtaactcctcccacacaaatagtctgcctaccctcaggaatattttttgtctgtggtacctcagcctatcgttgtttgaatggctcttcagaatctatgtgcttcctctcattcttagtgccccctatgaccatctacactgaacaagatttatacagttatgtcatatctaagccccgcaacaaaagagtacccattcttccttttgttataggagcaggagtgctaggtgcactaggtactggcattggcggtatcacaacctctactcagttctactacaaactatctcaagaactaaatggggacatggaacgggtcgccgactccctggtcaccttgcaagatcaacttaactccctagcagcagtagtccttcaaaatcgaagagctttagacttgctaaccgctgaaagagggggaacctgtttatttttaggggaagaatgctgttattatgttaatcaatccggaatcgtcactgagaaagttaaagaaattcgagatcgaatacaacgtagagcagaggagcttcgaaacactggaccctggggcctcctcagccaatggatgccctggattctccccttcttaggacctctagcagctataatattgctactcctctttggaccctgtatctttaacctccttgttaactttgtctcttccagaatcgaagctgtaaaactacaaatggagcccaagatgcagtccaagactaagatctaccgcagacccctggaccggcctgctagcccacgatctgatgttaatgacatcaaaggcacccctcctgaggaaatctcagctgcacaacctctactacgccccaattcagcaggaagcagttagagcggtcgtcggccaacctccccaacagcacttaggttttcctgttgagatgggggac

SEQ ID NO: 22 - DNA, 6053 bp, Homo sapiens
  repeat_region (1)..(6053): herv18
atagtcagcaggatcccgaggtgagtgagccttcggcccccgatgatcccgggtcggccatgtggccgcagcatgggttgtggtacccggtggcagctgtgctgctaggatgggctccagtggaaacatgggcggcggtggacgggtcccccatgagcgtggagaaggcgctgaagcacctggaagcgcagagcaccgagaaggagcgtgcctttgccggcagagtcggatgggcatttttgactgtgctacaggaagtacatgctcagtccctgcgggatgcagcacaggtaagggacctccaggcgcaagcggagcgcctggaggcccagatacacagcttggaaaaagacctggrggtaagggacctccaggcgcaggcagggcgcttggaggcccagctacacagcttggaaaaggaattagaggctgccgtgaatgcaggcctgggcccgtcatcccggccagagacccccactcggtctgataccgaggaggaagaacccccgttgcgggctcacccagtggtccgtcagaaagtagagcatgaacagccgttggggccccaagggcgggctcagggaccccctaccatgatggaacacacttcatatagtgcctataccccaactgagttgcgggaattaggcaagcagtgtcggcagcgttcgggggaacccctacccgcctggatgcttcacctttgggacgagggagctgacagtattttctgctccacctctgagatggaaaagctggcctccattatgactcacccctccctccgtcagtggttgcaggtgagcaggcagttagcacaggggcaaggcgaccacaccctaattgagtggctgatggcagccatacgaacggtatggaacgatgctggagaaataccagaaactgtgagtaaatggcagtcatatacagatttggtgcaagtaattcaggagatgggtatgcggcaggctatgtttgatctgaatacccgagggccagatgatgaacgctttacctcccacatgagggatcttgtgttgggctctgcgcccccgagtgccttcggctccctggccgctgtcctcaccccgtatgtggggcaccacatacatgaggtgactactgccatggcggccctcagggaagcagaaggccatcggcaggaccggggagtccgcgccataaagaaggggaaggcgccccctccacagggggccaccccatgagacaaaaaggggccccaacgggtgactcgcacgcagatgtggattgatttgattttggctggggttgaccgagagaaaattgataagcagcccaatgaagtactgttaactttgtggaggcaattgtccccagagcagcaattccagaaaatgcccaagagggggaaggacattgctgctcgacccagtcccgcccagacgctccagctcaaggactacttgctgcagccaggcggaggtatagagccttttctgtttgattagggaactggccgaggtgcccggcttggggggacaccggacgaccggaggccacatgtggaattggcaatccactggtcccccaccaatgtacagtgggtgctggcgctggtagataccggcgcagattgcagccttgtctatgggaacccggataagtttccgggcaaggctgcatatattgacggctatggaggccggtcagtgaaagtgaaacctgtatctttgcaccttggcatcggccgcttggctccccgcttatacactgtgtatgtctctcccatacctgaatacattctgggggtggatgttttacatggcttggctttacaaaccatggccggagaattcagactccaagtacgtgtggttaagccggtactgcgtggacatacgcatcaccagccccaggtcctgccacaaccccgacgggttacttccactcatcaataccgcttgccaggtgggcatacggagataactgagactattaagaagttaaaggaggtgcagatagtgcgtggcacccatagcccctacaattttctggtatggccagtcagaaagcctgatggaacttggcgaatgacggtggattatcgagaactaaataaagtaacaccccctttacatgcagctgtaccatctatcatggatttgatggaccgcttgacaacggaattgggacagtaccactatgtggtggacttggccaatgcattcttctcaattgacattgctccagagagccaggaacagtttgccttcacatgggaagggcgacaatggactttcacagtgttgccgcagggctatatgcatagccccaccatatgtcatggtcttgttgccacggatttagccgcctggaaatgtccaaagggggtccacctattccattatattgatgatattatgttaacctctgattctcttgcagatttagaagcggcggcacccctcttgcgacaacatttggcagcatgcggttgggccgtcaacgaatccaaggtccaagggcctggattgtctgccaaattcttgggagttatctggtcgggtaagacgaaggccataccagaggccatcattgataaaattcaggcatatccccggcccaccatggtgaggcagctgcagacttttgtgggcctcttgggatattggcgggcattcgtgccccatttggctcaaatgataaaaccattgtatcagttaacaaaaaagggagctgcctgggattgggatgatgaggctgagaccgcctttctggcagccaagcgggctattcagcaggcacaagccctacgggtagttgaccaggggcgcccatttgaactggatgtgcatgtgaccacagatggttttggctggggcctatggcagcgcacggagcgcttgagaacgccagtaggcttttggtcccaactttggaagggagctgagctccggtattcattgatagagaagcagttagcagctgcatatgctgcccttcaggctcgtgagagcgtggcaggatgggctacagtcatcgtgcggatgacttacccaatagcgggatgggtacgttcatgggtaacgaccccccagactgggacggcgcagacatccactttagcaaagtggggcgcctacttagaacagcggagtacgctgagtacaagtcccttagcagcagagttgcaagaggtcttgggacctgtagtcctaatgcaagataaggccatggggcctgaggcacccctagaccctgagccttcaccgtttaaggaagggcatccccccattcctgatggggcatggtacacagatgggtctagccggggtgctactgctgcctggactgctgtcgcagtccagcctagtactgacaccatatggtttgataccgggtgtggacaaagtagccaatgggctgaactcagggcagtgtggatggtgatcaccaaggaggtgacacctatggtaatctgcaccgatagctgggcagtttatcgaggcttaaccttgtggttaactacctagaagttacagaagtggctagttggtcaccggcccatttggggccaagccatgtggcaagacctatgggaaatgggtcatcaaaaagatgtaactatttatcatgtgtcaggccatatgcctttggccgcccccagcaatgatgaggcagatgccttggccaaggtccaatggttagagtcggcatctacatgagatgtggccttgtggctacaccggaaactgggacatgcggggggtaaactgatgcaacaggtcaataagtgctggggtctgtctttgcccacgcaagacatttgggaggcctgccagaagtgcccagcatgcgctcaggcataccctagacggagacagctgcccagtgttacacaacaagtgacggtagggcggatgcccttgaccagatggcaaatagactacattgggccgctgccaaagtcgcaggggtatacacatgcactgacggctgtagacatggccaccagcctgttgttcgcctacccttgcagggtggccgaccaacaacacaccattcaggccctgcaacacttatgtgccctatatggtcgtcccctggccattgaaagtgataggggaacacatttcactggacagcaggtacaacagtgggcacaacagatggacataaagtgggggtttcatgttccttacaactcgcaagccgcgggtatgattgagtgatataacggactcctgaagaatgggttacacttgcatgttactcccccgtctttgcggggctggagttccaggctggacctggtgctccaaatcttgaatgaatggccacggaaaggcggcccagccccagtggaggcactgttacaccgggccgccgcccctatccagttacagatacacaccaaggatgacctcctccgaccaggtatggggacaaacggtaacctgttgttgcctgccccaacgcccctgaaggcaggggaacagaaaacctggctgtggccatggaccctccaagccccccattgccgatggttggctatcgtagccccctgtggggagggcctacagtatgacttacatgtcactccttgggtatttaatgtatggcctccgcgattgaccgttcataggggaatggccagggaaggaaccctcctccgggggacatatgtactgtctgtgtggcctattatgagctcccctgtgactttggcacggatacaggacccaaaggaaccatggggagctgagaaggtgtggtaccattgcccagggcagaagcccttggtggctgcattgttatccagggatgaaaggttggcctgtattttgcctgagggacgtgatttacccctgttagtacctgtgcctgctttgtcatttcgaccgtaggttgacatgctccaacagcattgtggactgggcccacacctacactgaggtgaccaatgtttccaactgttggatctgcaccgcccttccagcagcagctgcggatggcttgccctggcacatacatccagcttctgcggagaactggacatggctagagacttggggtcccatggccgacggttggaatgcaacacggcaagctttggatagggggtgccgcaaaacccacattgcaatgcctgccccctggctgacccatagcatttatgatggatggggctggctagtgggagaacatgtggtgcccccagcgcaggcaccatgatgtatagagcaacattggggtaatgtcaccgtggggtggttgcccgccacagcctgtgcaaacataacacatgtcaccacaccaaaggtgtggtggaacaagcggcctcaccaaggctgggccccgatggactttgtgccccctgggagtttatgggtctgtggggacacaggatggccatatctgccagcgaattggactggatgttgtacctgggggtggccttatgtgcctgccactgttcttcccacattgcctaggtgcccgcataactgggaggcgctacgttcccggtttttgcgagtgcgacgagccccctggtggttctaccccttagcagtaactatccttggagcgggtgtcatcactgtagaaatgcaagttacagcccttgcagagcacacagctcaggccctgaattacacccgagttgccctccttctgttaacggatgaggttgatcaaatcaggaaggtggtgctgcaaaaccggatggtcttagacatagtaactgctgcccaaggtggcacctgtgcccttttaggaacacaatgttgtacctttatccctgacaatcaccagaacataacagcagctttgcaaggggtgtcacaggagattaaggcggttgagagccttactgatgaccccctgcagagatggtgggcatccctgggctctggcctacgctgggccctaataatcataggtagcatagcgggaatattagtggtgagttgttgctccctgtattgttgctgtggcctatgggtccagggttccaccctatgggcacgtgtccccactaggaggactccctcggcctagggggtgga

SEQ ID NO: 23 - DNA, 4843 bp, Homo sapiens
  repeat_region (1)..(4843): herv23
ttttggtgatgcctatgggacccaaagtggggttccagcaatccctatcacttcactgaaaattgaagccttggtaccgtcatgaatgactttcattgacctgacctcgccaatgtcaacagggatcactgggcaggcccctctcaggatctgcatctttctagcttggctgagaattcagactttatttgagccatacacattcctaacttgacaagtttggaattgaagtctactttaaggcataaattttatttgttattctctggagattgcggagttgtgattttcacttttctctgatgttaaggttttgtgttgaattactcattagagtttttataaccttttctctcattcaaatcttggtcagggagaaaaatagattctctcccttaaaagaggaagtggatatttgtggcttaagcaaaatttataatctttaaaactggccagattctgaaacttgaatcaaatgatgaatctaaactttcttttgactgaccacaattcctcacgctaggtctttttggccattcaaaggaataatctaaattatggtgagtcatacttctataactgggacttctttaagaagagatccagggacgaatccttgatttttaaagatctagatgtgttgccttccagctgtgcctgcttttcacatattaaatattaggccctggccctggaccatgagaacgagctctttcccctattcgttaaaaggctccactctgaagtcagtaaactcataaaaaaacaagctaaattgaaaagaccaactgtctacccaggtaagtctccaaaatatggctttttggcatttagctggctgttttgaaacgctttgtaaaagaaatgtatatctataaattaaatctccatttgtaagggcatctcccttactgtaactaaactgctagaaacatttaagttgaggaacacattgcataacaaactttacctttatttaaggtacttttcctagaatcttggcttgactaggcctttacctatgcctttctttgactcagcaaataatattgtatagatctaagttctgtgcctttgggatgtaaattttcacctaacattcatgtcttcggaggggtgaatttatggtcacctagctaacaattgtttacggcttggtagtctaaagagagaagagaaactctttgaaaactggccaatgaagtaccttataaagctatcaaatcttctgtctgtgtatctgtatgtctacgttgtcaatcaagaataatgacccatatgtttatatgaatcatgtgtatattatatgtaactaccaaattatatgaatctaattaactggcttgaagaaaaagaaaccacataaatcaaatattttattagaaaaacagaaactaactcaaatgccatttagttcacatgacttgggtcatctttcataagtaagacttgtttaatattgctggtttgatgaaaacagttgtgtattctgatcagcaaaatacccatgcatttacctatagagttcttgcttaaatggtaactacctattaataacattcacatactattaaaatgactatcaaaaaaacttgagatgaagactagcttaatttaatgagcaattcaggtataattgttaagaatgaatgaattaaacaaatataaatggaataaatgtttataaataaagtatccattgtttagaaatcattcagtaacttaatattaaagtcatattatgttaaattaagtaatatgtaatcataaagtgtctgagttgcttatatggtatagaaaagagaaacatatttatatttcttaataaaccaaaaaagaaacatttttctaaaaattttgaaatggtttttaactacaaatactcatataaaacagttccaaattacttatttcctagatttttcccagaaaattagggtttataatagttaaaattatagttaatttatatatgtaattaagactagtagatatatgagatacaactcaatatacaaggtatatgaagaaagtcaaatatatttttggtaaaataagatgaaaggagatagtgatatttgtgtgtttgcttggcagaagaaagaactttgtgtggtcaaaatgataagggataaaggaaagtacatttttattctatgatagaatggcaatatttttaaaaaggtataataggataaaattggaggttaaagccagttatataaggtttgtggaagattaagctcatgaaaggaattttgtctgtgattgaattggctaaaattagaagaaaattatttataaggtttttctaaaaattgagcattaatataaaaaacacattaatttaaggccagagtctgggctcctgtgtcagaacaacaattttctcagagcattgatctgttccttaatagaaaattgtaagaggttataaaacatttatggaaatcttatcttatatggtcaaagttgactgagattggatgaatttggtattaaggttttattaaaattagctttagtagtggtaatacagtaatataaaagtaaattttctttttttccctttgaataagattttatgtagtattaatgagagataagatttgtttacctcttgagtaaactacagaaaaaaagggaagagtttatttcatgctgtcattattaggtctcttgattgggaactgggtctcctctctatcaaagagtaaaatttttgctgtttgaaatcttaatctttgaattagtatattggctaaataaatgactgttattttacagtctgtgatcctaatttactatgtgttttaaacctttttaattttaatattaaggtttttaaacctttaatatttgagattcttaaaattacattttaaattctgaagttatctttctgacccaaactgatgaagataattaataaaaactctggaaatccaagagagacatattaaacttctttcatacagaaagaaatgtcaaataagaaattatgtttaagtttcttagagttatatttgtataaatgtgttattaatgtgtgtttcaaaattgaaaaagatgcctaaaattatatcttggaatacattatcagtcataattatgattatgttaaactgttgtattactacaaaaaatagccaattttctgtcaattgcatatttaaccaaaccatgacaattcaaagttttttgtcattcatggacagttattgttttactttgattcttctcaaaaagtagtttatgatcaactgctgtctaaaattggtttcttctgaaaggaaattcatggaagaggatcctgacaagtactcttcagtacaggtttctgataactttagagataataccactgaagtaagtaaaaacttctagaactctaacaaaaactgatgtagtcatgaagattgccaacctaacatcgttaagcagaaaaataattacttacatgggactaagctgatagagaattaaaattatttttatggcatttttgtttgaaccattgttgattctttctaaattttgcttttcagagtcaagaaaacagttttttttagccatttatagcttacagcaattgggtatagtataattttgtgaacaaaactgaaacagttacccttccttctatgtggtttctccaaaatttgaaaactattcatgagcattcttattttatggcaatataatttcataatttcaataaaaagatgctttcttttccaacagaacacattggagacattggtaattttaccaatgttttgtctggaacagtgtattttcagatataaccagtctgctttgagaaattaaagccacatggaaagaatggcctggaacctagtttacacagtttccttacaaggttccagaccttgtagtaaataatgaatatcactttctgacaggctcaggaaactcaagatatttggggactacaagaagagagaaattcactcaatttgtacaggtattgtaagtaccattttatggtgactctttggcttcgcttccttgcctagagataattttaatagtctaatatgaatcttctaatgaaaaatttccagcaaagccaacttaaatttccagcaaagcctgcaggaccagtcactgttcttgtgaatgtttatgcaatgaccaggccaagtataatactaaaacttattttgcaattaaattggtcctactactatttatctttggtagaaatggaaaattggagagagaaaagaatgtgttttagaagaaaactgtagcacacttgttattagattacagccctgactattatttttgagtttttattattttcctacaactcagactaaattctgaagtatttcctggctacaagactctaaagaaaatctgggtgttaatttttttttattatgtttttagttgactcctcaatagaacagttgttttgttgttgttgctctggtacacaatatttttgttataatcctatgtgtgttataattctgctatgtatctcctgttgtttgacttcttttaagaaaactaaacacatgatattctaaagactaaagatgattcaacaagtgatagcaactatgtaaatcagtgacttgactggtcttatttttgtgaacctatgaggccattccaatttgtattttgaagctcttagaattcctcaatgagacatgtcctgtccccccaaccatgtgagatagagccatctgggaatgagctttactagcaatgcaggactaagattctcaacataaaaagagccaaaagcatttgagtttatctatgatgctttcttcaaaagatatttatgaaaaggggggaa

SEQ ID NO: 24 - DNA, 2799 bp, Homo sapiens
  repeat_region (1)..(2799): herv3
ctgggtattcgccctatgaaagactgttcggcaagccatccccaatcataagtcaaattaagggtaatcttcgtgaactaggggaattaactttaaggaggcaaatgcaggctttagggatagccatgtgaagtgtccatggctgggtacaggaaagaatgcccataagcctgatagatccaatacacccctttaaacccagggactctctttgggtcaaaaaataaaacccaaccactctgggacccatatgggatgggctccatactgtaatcttgtctattcccactgttgttaaagttgcaggaattgtgccttggatccatccatccagtcagctgaaaccagcagcccaggacaagtggaccagccaacaggacctagaccatgcaacccagctgatcctacgatggaaccaaggtgccagtgagatgacaacagccctgctctggtcactccggaagctgaccagtccacgcacggctgaagcttgaggagacaacagccctgctctagtcaccccagaagctgactagtctatgcacggccgaagcttgagtcatcatcagggaagtaaatgtggttagaaatctgaagtccagtaattttccttgtcatattaattactttgctattaagctgtcactttgcttagccttctccccccaggaaaaagccttttctgtccatgctgggtatgaacatgctactcatcactttgttcttgctactccccttatccatgttaaaaggagaaccctgggagggatgcctccactgcacccacactacgtgtcggggaacatcatgactaaaaccctgttgtatcacacttattatgagtgtgctgggacctgcctaggaacttgtactcacaaccagacaacctactcagtctgtgacccaggaaggggccagccttatgtgtgttatgaccctaagtcttcacctgggatctggtttgaaattcatgtcgggtcaaaggaaggggatcttctaaaccaaaccaaggtatttccctctggcaaggatgtcgtatccttatactttgatgtttgccagatagtatccatgggctcactctttcccgtaatcttcagttccatggagtactatagtagctgccataaaaataggtatgcacaccctgcttgttccaccgattccccagtaacaacttgctgggactgcacaacgtggtccactaaccaacaatcactagggccaattatgcttaccaaaataccattagaaccagattgtaaaacaagcacttgcaattctgtaaatcttaccatcttagagccagatcagcccatatggacaacaggtttaaagacaccgctaggggcacgagtcagcgatgaagaaattggcccaggagcctatgtctatctatatatcataaagaaaactcggacccgctcaacccaacagttgcgagtttttgagtcattctatgagcatgttaaccagaaattgcctgagccccctcccttggccagtaatttattcgcccaactggctgaaaacatagccagcagcctgcacgttgcttcatgttatgtctgtgggggaatgaacatgggagaccaatggccatgggaagcaagggaactaatgccccaagataatttcacactaaccgcctcttccctcgaacctgcaccatcaagtcagagcatctggttcttaaaaacctccattattggaaaattctgtattgctcgctggggaaaggcctttacagacccagtaggagagttaacttgcctaggacaacaatattacaacgagacactaggaaagactttatggaggggcaaaagcaataattctgaatcaccacacccaagcccattctctcgtttcccatctttaaaccattcttggtaccaacttgaagctccaaatacctggcaggcaccctctggcctctactggatctgtgggccacaagcatatcgacaactgccagctaaatggtcaggggcctgtgtactggggacaattaggccgtccttcttcctaatgcccctaaaacagggagaagccttaggataccccatctatgatgaaactaaaaggaaaagcaaaagaggcataactataggagattggaaggacagtgaatggcctcctgaaagaataattcaatattatggcccagccacctgggcagaagatggaatgtggggataccgcaccccagtttacatgcttaaccgcattataagattgcaggcagtactagaaatcattaccaatgaaactgcaggggccttgaatctgcttgcccagcaagccacaaaaatgagaaatgtcatttatcaaaatagactggccttagactacctcctagcccaggaagagggagtatgcggaaagttcagccttactaactgctgcctggaacttgatgacgaaggaaaggttatcaaagaaataactgctaaaatccaaaagttagctcacatcccagttcagacttggaaaggatagtctccagattcccttttcagaggttggttcttatcccttggaggatttaaaaccttagtacaaatagtcctagccatattgggagtttgccttatactcccttgtctcttacccctcattgtcaaaaatatccaaacagccatagaggctcttgtggacagacggactaccacacgactaatggccctaactaagtattaacccctgccaagaaaagagctacttcctcttgaagtaaatgaagatagtgatgctttctcttaaactttacttataaaaagcatcaaaggggggaat

SEQ ID NO: 25 - DNA, 833 bp, Homo sapiens
  repeat_region (1)..(833): herv49i
gtctgaaaatggctgggaacccgagacacataagattttaagcagcacactttttgttctgaatgtgtcaagctctcaggagggtttgtcttaagaagtcccatccataaggggcttttgtcatctcaacccttgttgcctggttagtcctgggaaagtccaatcccaggagggcctacccggtgtcacggattaatgggtctgtgactggcagccccccacaaatttgtgggttactggaggcaccgtacgcacaaacaccatccttaaccatctgtggcaacaagagtcttttgctatcttagcctattcctgggagtaaattttttgagaatcattgggattgcctcttctatgccctctccaggaacacctcttgcttatatggtaaaagttattctaaacctggaaaattaccttttgggctttccatgaagaggcttattggattgagtcgctattggaataagtacaccattgaaaattctaattgtcaatggccaaaagatggatcctttaaattagaaagactcctaaatttaaaaaaaaaaaggattttagagatctcttattctaaacaattgccttatttgtattgatgggaagatcaaatttaaaaaaagacacataatagtgtcatggctagccttaaaaattctcttgactaaattaaagagcaaaaatctgacctaaaacaaagttaaaatcttttgtacgctcaaactgcccgctttggattccctgcgggattaacaatgaaggccactccatcttgtagtctggtggttaaaattccatactttcaccaccatggcctgggtttgattctcggt

SEQ ID NO: 26 - DNA, 8399 bp, Homo sapiens
  repeat_region (1)..(8399): herv9
ttttggcaaccacgaagggactatcacctatcgccaagcggtgagactattgcatagcgccaagcagtgagtaccatcagacccctttcacttggtattctgtcctatttttccttagaattcaggggctaaatactgggcacctgtcagccagttaatagtgactagcacggccactggactaaaaacacgggtgtcaggctttctgggaaagggctctctaacaacccttgactctttggagttgggagcgttggtttgcctggaaccagcttccacttttcctatacttctaggctgagccaagggtcaacagagaggaaagccatttagctctgggggtcccgaaaacaagttggttgaccctgcagtcatgagcggaactctcaaagtcatgtcacccaagcgagacttgcccatctattctatctaccctgacccttgcctcctgggtcctaatgcctgccagacaaacttcctctcacctctcttctccaaggctagtcctgcttctaaaaaccactccctgtctctggtgcttttctagtttctcctataagaatgatttctagtataaactccaggaatctattcccttctttaggcaactgggctcaccaatcagaaagacataattttttcccaaagccctgtcgcagtggggactatctggaattttaggatccttccttagaatagcaggcctaacgaaagctattcctgaagctaggatatggggagcctcataaattgtatccttcctattcatataaatgaggacaaaaggcatcactcttccaactctggagatcccttccctccctcaggttatggccctcaacttcatttttggggcataacatctttataggacacgggtaaggtcccaatactaacaggagaatgcttaggactctaccaggttttcaagaatatgtcataagggtcaccaaatcctatttttctcggtcctttttgtggtctaggatgacaggcaagggtacaggtttttgagaatgcatcggtaatggccactaaatcctaccttcctcggtcctccttgtggtctaggaggaaatctagtgtttctgatgctgtgtcggtgagcacaactattccaatcagcagggtccagagactgttgccagttcttgggcaggggttgtttctgctgctgcatcggtgattgcaactattctgatcagcagtgtccagggaccattgtgggttcttgggcagggggagaaacaaaacaaaccaaaactatgggcggtttgataggaaacactcaggcatcaacacgctcacccttgaaatgtatcctaagccattgggaccaatttgacccacaaaccctgaaaaagaggcagctcatttttttctgcactacagcctgaccctaatattctctctctgatggggaaaaatggccacctgagggaagtataaattacaatactatcctgcaggttgaccttttctgtaagagggaaggtaaatggagtgaaataccataaggtattacaagctttcttttcactgaaggagaatacacaactatgcaaagcttgcaatttacatcccacaggaggacctttcagcttacccccatatcctagcctccctagagctctccttcctattaatggcaagcctcctccaatctcccctgcccagaaggaaataagcaaagaaatctccaaaggaccacaaaaacccctgggctatcggttatgtccccttcaagctgtagggggtggagaatttggcccaacccaggtacatgtccccttctccctctgtgatttaaagcagatcaaggcagactgggggaagttttcagatgatcctgataggcacatagatgtcctccagggtctagggcaaaccttcgatctcacttggagagatgtcatgctattgttagatcaaaccctggcctttaatgaaaagaatgtggctgtagctgcagcctgagagtttggagatacctggtatcttagtcaagtaaatgatagaatgacagccgaagaaagagataaattccctactggccagcaagccatccccagtatggatccccactgggacctcaactcagatcatggggactggagtcgtaaacatctgttgacctgtgttctggaaggactaaggagaattaggaaaaagcccatgatttattcaatgatgtccaccataaatcagggaaaggaagaaaatccttctgccttcttcaggtggcttcaggagaccttaagaaaatatactccactgtcacctgaatcactcgagggtcaattgattctaaaagataagtttattacccaatcagcagcagatatcagtagaaagctccaaaagcaagccctgggccctgaacaaaatattgaggcattattaaacctggcaaccgtggtgttctataatagggaccaagaggaacaggcccaaaggaaaagagatcagaaaaaggccgcagccttagtcatggccctcagaccaacaaactttggtggttcagagaggacagaaaatggagcaggccaatcagctggtagggcttgttatcagtgtggtttacaaggacactttaaaaaagattgtccagtgagaaacaagctgcccccttatctgtgtctactatgccgaggcaatcactggaaggtgcactgccccagaggacaaagtttctctaggttggaagcccccaacctgatgatccaacaacaggactgagggtgcccagggcaaacgccagctcatgtcatcaccctcactgagccccaggtatgtttaaccattgagggccaggaaaatgacttcctcctggacactggcacgtccttctcagtgctaatctcctttcctggatgactgtcctcaaggtctgttaccatccgaggaatcctggggcagcctgtaaccaggtgtttctcccacctcctcagttgtaattgggagactttgctctttctgtatgcctttcttgttatgcctgaaagtcccacacctttattagggagatatattagccaaagctggagctattatctacatgaatatggggaacaagttacccatttgttgtcccttacttgaggagggaattaaccctgaagtctgggcattggaaggacaatttggaagggcaaaaaatgcccacccagtccaaatcaggctaaaagactccaccacttttccttatcaaaggcaatatcccttaaggcctgaagctcttaaaggattacaggatattgttaaacatttaaaagctcaaggcttagtaaggaaatgcagcagtccctgcaacaccccaattctaggagtacaaaaaccaaatggtcactggagactagtgcaagatcttagactcatcaatgaggcagtaattcctctatatccagttgtacccaacccctataccctgctttctcaaataccagaggaagcagaatggttcatggttctggacctcaaggatgccttcttctgtttcccctgcactctgactcccagtttctgtttgcctttgaggatcccacagaccacacgtcccaacttacatggatggtcttgccacaagggtttagggatagccctcacctgtttggtcaggcactggcccaagatctaggccacttctcaagtccaggcactttggtccttcagtatgtggatgatttacttttggctaccagttcagaagcctcatgccagcaggctactctagatctcttgaactttctacctaatcaagggtacaaggcatctaggtcaaaggtgcagctttgcttacagcaggctaaatatctaggcctaatcttagccagagggaccagggccctcagcaaggaatgaatacagcctatactggcttatccttgccctaagacattaaaacagttgcaggggttccttggaatcaccggcttttgccgactatggatccctggatacagtgagatagtcaggcccctccatactctaatcaaggagacccagagggcaaatacttatctagtagaatggtaaccaggggcagaaacagccttcaaaaccttaaagcaggccctgtacaagttccagctttaagccttcccacaaacttctctttatatgtcacagagagagcagggatagctcttggagtccttactcagactcttgggacaaccccacaaccagtggcatacctaagtaaggaaattgatgtagtagcaaaaggctggcctcactgtttaagggtagttgcagcactggccatcttcatgtcagaggctatcaaaataatacaaggaaagatctcactgtctggactactcatgttgtaaatggcatactaggtgccaaaggaattttatggctatcagactaccacctacttagataccaggcactactccttgagggaccagtgcttcaaatatctacatgtgtggccctcaaccctgccacttttctcccagagaatggggaaccaattgagcatgactgccaacaaattacagtccagacttatgccacccaagatgatctcttagaagtccccttagctaatcctgaccttaacctatataccgatggaagttcatttgcagaaaatgggatatgaagggcaggttgtgacatagttagtgatgtaactgtacctgaaagtaagcctcttcccccagggaccagcacccagttaacagaactagtggcacttacctgagccttagaactgggaaagggaaaaagaataaatgtgtatacagatagcaagtatgcttatctaatccctcatgcccatgctgcaatatggaaagaaagggagttcctaacctccgggggtacccccattaaatgccacaaggagattatggagttattgcatgcactgcaaaagcccaaggaggtggcagtcttacactgccaaagccatcagaaaggtgaaggagaaaaggcagaaggaaaccgtcaggcagatgctgaggccaaaattgctgccaggtggatactcccattagaaatacctatggaaggacccttggaatggaacaaacccctccaagagattaagccccagtattccccaaatgaaacagaatggggactctcatgggggcatagttttctcccctcagggtggttaacgacaaaagaaggaaaggtacttatacccgaagccagccagtggaaaatacttaaaaccctccaccaaacttttcatatgggtattgaaaacactcatcaaatggccacatctctattcacagggccaaatctactctgggccttccaacaggtagtcaaaacctgtgaggtgtgccaaaggaataatcccttggtccattgtaaggcccatttgggggaacaaagaataggtcactatcctggagaggactggcagttagacttcacccatatggcctaaatcaaagggatttcaatacttgttggtctgtgttgatacctttacaaattggatagaagctttcccctgcaagacagagaagactcaggaagtgattgaagtcctaattgatgaaataattcctagatttgggcttccctaaggcttacagagtgacaatggtccagttttaaagccacaataactcagggaatgtccaggctgctagggatacagtatcaccttcactgcgcccggaggccacaatcctcagggaaggtcaagaaggcaaatgaaacactcgaggcacttaaggaaactaacacaaggaacatctcccatggcctactcttttgcccatggccttgttgagaatccgaaattctcctcacaaaatggggctcagtccatatgaaatgctgtatggacaacattttctcacaaatgacctcctacttgatgaggaaaagacaaacttgttcaaagatataacttcttcggcaaaatatcaacaaaaccctaaaaacctacctgaaggatgtcacagagaaaagggaacagagttgtttcaaccaggagatctagtgttggtcaaatctctcccctctacctccccatctatggactctctgtgggaagggtcatactcaataatcctctctacccacactgcagttaaggtggtaggagtgaaatcttggattcaccacacccgagttaaattttggacatcccctgaggaacctgtgagaccatcagctcaggagtcccaagatcagccagaccagcctcaatacacctgtgaaccattggaggacttgcatctcctatttcggaaggaaacatcccagaataaaatggctcctaccactaatcctgaggaaaaaccccttcctccttaaaaaagataagtgaaaacctacataatctttatctttaatacctctccttgcccctttaatggaatccttttactatttcatcatattattaagcagcatactaaccatactctttgtgataggactatatactgtagctcctgccaggatgaaaatcctaatcacatcaaccttctttctatcatccttccttgtgacagcaatttactcctacctttaactcagcctggaaaaaatgatgtcatcttccagagcaccctctttacctttctatttactctttgcctatctatccctcctgcttccttggatacctcatacaatcactgctccccttccactagctcctaattacctctacaagactctcaacttaacccactgtctgttaaaccagtccaatccttccctggcaaatgactgttggctttgtatctctctatcaacctctgcttatgatgccactcccagtcccataaaaaacttggtctttaccaacttaatctaccaccctcattatgaaggaaaagaccttttctgacttctaaatatgcaatcattagctgacttacccatctctgataggaccaagaataccctaacaggaggcgcaatccaacttttacgttcttacatttccaacctcaactattacacaagcaatgaaaagcccatacacagccctgtaactatgaataccatcttaactttccaagcccctttatgcatccaatgcaacctgttatcaggcctgcccctggggcacttactaccccatcagtgtaattaaaccctacaacttcaagccccaactgatcatagtaacttctgagtcacccaaacagctccattcaaatggtttgtctgctcagggcccccaaaaatcatcacctcctccctgcttaacaaacagtccaggttttgtaatggcaaacatattccctgcatgaccattcacccctggacaccctgcagcagcacccccactactagtgaatgccttctcatcccctctttcagtcactctctcaaatggttcctagtagatacaaaatggtttttttctccaatgggaaaatagaacacagggagctcccaatacccctttccagccacttactggagctaccttggcaagtactctaggagtatggataaatgaaaacaacaaattcacacacctttttaatatacacaaccaattctgtctacccagccaaggtatattcttctaatgtggaacatcgacctatatttacctccccactaactggacaggcaactgcaccttagtctttctaagtcccaacattaacattgccctaggaaatcagaccctatcagtacccctcaaagctcaagtctgtcagcacagagccatacaactaatacccctacttatagggttaggaatggctactgctacagggagcagaagagccagtttatctacttcattatcttactaccacacactctcaaaggatttctcagacagtttgcaagaaataatgaaatctatccttactctacaatcccaaatagactctttggcagcagtgaccttccaaaactgcagaggcctagacctcctcactgctgagaaaggaggtctctgcaccttcttaggggaagtgtattgtttttacactaaccagtcagggatagtaagagatgcttcctggcgtttacaggaaaaggcttccgaaatcagacaatgcctttcaaactcttataccaacctctggagttgggcaacattgcctctcccttttctaggtcctgtggcagccatcttgctgttactcgcctttgggccctgtatttttaaccttcttgtcaaatttgtttcctctagaatcaaggccatcaagctacagatggtcttacaaatggaaccccaaatgagttcaactaacaacttctaccaaggacccgtggaccaacctgctggcccttccactggcctaaagagttcccctctttaggacactacaactgcagggccccttctttgcccctatccagcaggaagtagctagagcagtcattggccaaattcccaacagcagttgtggtgtcctgtttaggagggagat

SEQ ID NO: 27 - DNA, 7813 bp, Homo sapiens
  repeat_region (1)..(7813): herve
tttcttggttccctggccaggaagcaaggtaattgaaggacagtcgaggcagccccttaggtggcttaggcctgccctgtggagcatccctgcaggggactctggccagcttgagtgacgcggatcctgagagcgctcccaggtaggcaattaccccggtggaaagcctcgtcagagagtgcgtggcaggcccctgtggaggatcaatgcagtggctgaacactgggaaggaacaggcacttggagtccagacatttgaaacttggtaagactggtcttcggaacttgcccactccatttgagtggaagcgtggcctgatcaaccacggcatgcctgtactggcactttggtttttgtttttgacttgacttgaattgcttgatactttggttttggtttgacctggcttggatttctggatactctgattttggttttgattctggtttggtgaaaactgaaaaagtgtgtgtgtgcactttttacccattctttgttttgtggtgtgcatgtggtgtgagcttggtgttttgtcttgaggaaacatggatcagacacaaaataagcctactcctctaggaactatgttgaaaaattttaagaagggatttaatggagactatggggttactatgacaccagggaaacttagaactttgtgtgaaatagattggccaacattagaagtgggttggccatcagaagggagcctggacgggtcccttgtttctaaggtatggcacaaggtaactagtaagtcaggacactcagaccagtttccatacatagacacttggttacagctggtgctagaccccccacagtggctaagagggcaggcagcagcagtgctagtagcaaagggacagatagtcaaggaaggattctgctccacccgctgagggaaatcaactcctgaagttctgttcgaccaaacatcagaagatccattgcaggagatggcaccagtgatcccagtgttgccctccccttatcagggagagaggctccccacttttgagtccacagtgcttgcgcctctgccagacaaatgtatccctaggccactcagagtagacaagagaggaggtgaagcctcgggagaaacccctcccttggcagctcatttaagacccaaaacagggatacaaatgcccctgagagagcagcagtatactggaatagatgaggatgggcacatggtggagagtcgtgtttttgtgtaccagcccttcacctctgccgaccttctcaactggaaaaacaataccccgtcctatactgaaaagccgcaagctctaattgatttgctccaaactattatccagacccataaccccacttgggctgattgccaccagttgctcatgttcctctttaaaacagatgaaaggtgaagggtgcttcaagcagcaactaagtggctagaggaacatgcactggctgattaccaaaacccccaagagtatgtaaggacacagttaccaggaaccgacccccagtgggacccaaattaaagagaggatatgcaaaggctaaaccgatacaggaaagctctcttagaaggtttaaagaggagagcccagaaggccacaaacattaacaaggtctctgaggtcattcagggaaaagaagaaagtccagcaaaattccacgagagactgtgtgaggcttattgtatgtatactccctttgatcccgatagccctgaaaatcaacgcatgattaacatggctttagttagtcaaagcacagaagacattagaagaaaactgcagaaaaaggctgggtttgcagggatgaacacatcacagttattagaaatagccaaccaggtgtttgtaaacagggatgcagcaagccgtaaggaaaccacatagagaatgaacgtcaggcccggcgaaacgcgcctgttagctgcagcaattagaggggtccccccaaaagaggcaaggcaaaaggggggccctgggaaagaaactcagcctggctgtcagagcttgcagtgtaatcagtgtgcttatcgtaaagaaataggatattggaagaacaaatgccctcagctaaaaggaaaacaaggtgactcggagcaggaggctccagacaaggaggaaggggccctgctcaacctagcagaagggttattggactgagggggactgggctcaaggacctccaaagagcctatggtcaggatgacagttgggggtaaagacattgattttcttgtagataccagtgctgaacattcggtagtaactgcctcagtcgcccccttatccaaaaagactattgacatcatcggagccatgggagtttcagcaaaacaagctttctgcttgccccagacttgtactataggaggacataaagtgattcatcagtttttgtacatgcctgattgtcccttgcccttgttgggaagagacttgcttagcaaactgagagccactatctcttttacagagcacggctctttgctgctaaagttacccggaacaggagtcattatgacccttatgctcccccgagaggaggaatggagacttttcttaactgagccgggccaagagataagaccagctctggctaagcggtggccaagagtgtgggcggaagcgaaccctccagggttggcagtcaaccaagcccccgtgcttatagaagttaagcctggggtccagccggttaggcaaaaacagtacccggtcctcagagaagctcttgaaggtatccaggtccatctcaagtgcctaagaacctttagaattatagttccttgtcagtctccatggaacactcccctcctgcctgttcccaagcctgggaccaaggactacaggccggtacaggatttgcgcttggttaatcaggctacagtgactttacatccaacagtacctaacctgtacacattgctggggttgctgccagctgaggacagctggttcacctgcttggacctgaaagatgctttctttagcatcagattagcccctgagagacagaagctgtttgcctttcagtgggaagatccagagtcaggtgtcactactcaatacacttggacccagcttccccaaaggttcaagaactcccccaccatctttggggaggcgttggctcgagacctccagaagtttcccaccagagacctaggctgcgtgttgctccagtacgttgatgaccttttgctgggacaccccacggcagtcgggtggccaagggaacagatgctctactccggcacctggaggactgtgggtataaggtgtccaagaaaaaaagctcagatctgccgacagcaggtatgttacttgggatttactatccaacagggggagcacagcctaggatcagaaagaaagcaggtcatttgtaatctaccggagcctaagaccagaaggcaggtgagagaattcttaggggctgtgggtttttgcagactgtggatcccaaactttgcagtattagctaagcctttgtatgaggtcacaaaggcgggggaccaggaaccttttgaatggggatcccagcaacagcaagcctttcatgagttaaaggaaagacttatgtcagtcccagccctggggctacctgatctgacaaagccttttacattgtatgtgtcagagagtgaaaagatggcagttggagttttaacccaaactgtggggccctggccgaggccggtgacctacctctctaaacaactagacggggtttctaaaggatggcccccgtgtttgagggccttggcagcaactgccctgctagtacaagaagcagataagctgattcttgggcaaaacctgaacataaaggacccccatgctgtggtgactttaatgaatactagaggacatcattggctaacgaatgctagacttactaagtaccaaagtttgctttgtgaaaatccccatataaccattgaagtttgtaacaccctgaaccccgctaccttgctcccagtattagagatccctgtcgagcatgactgtgtagaagtgttggactcagtttactctgggcatcagtagactgggaactatacgtggatgggagcagctttgtcaacccacaagaagagagatgtgcagggtatgcggtggtaactctggacactgttgctgaagccagatcgtttccccagggcacttcaactcagaaagctgaactcattgctttaattcgggccttagaactcagtgaaggtaagactgtaaacatttacactgactcttgatatgtctttttaacccttcaagtgcatggagcattatgtaaagaaaagggcctattgaactctgggggaaaagacataaaatatcaacaagaaatcttgcaattattagaagcagtatggaaaccccacaaggtggctgttatacattgcggaggacaccagtgagcttccaccttggtgggtttggggaattcctgcactgacttagaggctcaaaaagcagcatctgcccttccgggcatcagtgacagcccccctgctccctcaagcacctgatcttgtacctacttattctaaagaagaaaaggactttctccaggcagagggaggacaagtgatggaggaaggatggatttggttaccagatgggagagtagctgtgccacagctgctaggagctgcagttgtactggctgtgcataaaaccacccatctaggtcaggaatcacttgaaaagttgttaggctggtatttctacatctcgcatttgtcagcccttgccaaaacagtgacgcagcggtgtgttacctgccgacagcataatgcgagacaaggtccagctgttccccctggcatacaagcttatggagcagccccctttgaagatctccaggtggacttcacagagatgccaaagtgtggaggtaacaagtatttactagttcttgtgtgtacctactctgggcaggtggaggcttatccaacacgaactgagaaagctcatgaagtaactcgtgtgcttcttcgagatcttattcctagatttggactgcccttacggattggctcagataatgggctggtgtttgtggctgacttggtacagaagacggcaaaggtattggggatcacatggaaactgcatgctgcctaccagcctcagagttccggaaaggtagagcggatgaatcggactatcaaaaatagtttagggaaagtatgtcaagaaacaggattaaaatggatacaggctcttcctatggtattatttaaaattagatgtaccccttctaaaagaacaggatattccccttatgaaatattatatcataggccccctcctatattgcggggacttccaggcactccccgagagttaggtgaaattgagttacagcgatagctacaggcttcaggaaaaattacacaaacaatctcggcctgggtaaatgagagatgccctgttaacttattctccccagttcaccctttctccccaggtgatctagtgtggatcaaggactgaaacgtagcctgtttgtgtccacggtggaaaggaccccagactgtcatcctgagcactcccaccgctgtgaaggtagagggaatcccaacctggatccaccacagccgtgtaaaacctgcagtgcctgaaacctgggaggcaagaccaagcccagaaaacccctgcagagtgaccccgaagaagacaacaagccctgctccagtcacacccggaagctgactggtccacgcacggccgaagcatgcagaagctcatcatgggattcatttttcttaaattttggacttatacagtaagggcttcaactgatcttactcaaactggggactgttcccagtgtattcatcaggtcaccgaggtaggacagcaaattaaaacaatgtttctgttctatagttattataaatgtataggaacattaaaagaaacttgtttgtataatgctactcagtacaatgtatgtagcccaggaaatgaccgacctgatgtgtgttataacccatctgagcctcctgcaaccaccatttttgaaataagaataagaactggccttttcctaggtgatacaagtaaaataataactagaacagaagaaaaagaaatccccaaacaaataactttaagatttgatgcttgtgcagccattaatagtaaaaagctaggaataggatgtgattctcttaactgggaaaggagctacagaataaaaaataaatatgtttgtcatgagtcaggggtttgtgaaaattgtgcctattggccatgtgttatttgggctacttggaaaaagaacaaaaaggacccggtttatcttcagaagggggaagccaacccctcctgtgctgctggtcactgtaacccactagaactaataattaccaatcccctagatccccattggaaaaagggagaacgtgtaaccctggggattgatgggacagggttaaacccccaagttgccattttaattagaggggaggtccacaagtgctctcccaaaccagtatttcaaaccttttataaggagctgaatctgccagcaccagaatttccaaaaaagacaaaaaatttgtttctccaattagcagaaaatgtagctcattcccttaatgttacttcttgttatgtatgcgggggaaccactatcggagaccgatggccttgggaagcccgagagttggtgcctactgatccagctcctgatataattccagttcagaaaacccaagctagcaacttctgggtcctaaaaacctcaattattggacaatactgtatagctagagaagggaaagactttatcatccctgtaggaaagcttaattgtataggacagaagttgtataacagtacaacaaagacaattacttggtggggcataaaccacactgaaaagaatccatttagtaaattttcaaaattaaaaactgcttgggctcatccagaatctcatcaggactggatggctcccgctggactatactggatatgtgggcacagagcctacattcggttacctaataaataggcaggcagttgtgttattggcactattaagtcgtcctttttcttattacccataaaaacaggtgagaccctaggtttccctgtctatgcctcccgagaaaagagaggcatagttataggaaactggaaagataatgagtggcgccctgaaaggatcatacagtattatgggcctgccacatgggcacaagacggctcatggggataccgaacccccatttacatgctcaatcggatcatacggttgcaggccatcttagaaataattactaatgaaactggcagagctttgactgttttagctcggcaggaaacccaaacgaggaatgctatctatcagaatagactggccttggactacttgctagcagctgaaggaggagtttgtggaaaatttaacttaaccaattactgcctacaaatagatgatcaaggacaggtggttgaaaacatagtcagggacatggcaaaggtggcacatgtgcctgtacaggtttggcacaagtttaatcctgagtctttatttggaaaatggtttccagctataggaggatttaaaaccctcattgtaggtgtattgctagtgataggaacttgcttgctgctcccctgtgtattacccttgctttttcaaatgataaaatattttgttgttactttagttcatcagaaaacttcagcacatgtgtattatacaaatcactatcgctctatctcacaaagagactaaaaaagtgaggacgagagtaagaactcccactaaaagtgaaaattctcaaagggggggaaa

SEQ ID NO: 28 - DNA, 6529 bp, Homo sapiens
  repeat_region (1)..(6529): hervfh21
ttctggtgccgaaacccgggaaggcgatagactctggctgggactcactctctctctctctctctctctctctctctcttcctctccctcccctatcacccctctcccggccaatctcccccttcccgaacctgctaaagacccaaaggatctcctaaattctcccattgttggcgacctcatccaccatcaaagcctccaccagggtgagtgaaaagagactgttgccgttccccagaacccttgaccatccatctctccacttccaaaagacccagcgctgggccaagggcttcctcccgtctctgggcctccaggaggccctcgattcctccatttcagggatgcctgactcggcggttacctcctttattccggacaagttccgtgggaaaggggacgccctctcccaccgtccttgtcatcagcagtctcttcttcccctaccctcccctcctccattcactataggagcctcccaatccactccttccaagaccaccccgctgggtgcctcctccgcaatctcaatgctctcggcctccattcagaaatccgttctaagaggcttatctttttcaacgttctcagatacagacaacttttgccatcgaaatgggaaatggtctgagattccttatgttcaggctttcttcactctccgtaaccgcccttccctctgtcagtcctgttctactttccaaatcctcctcgcccgctccaaacctgactcgcctcctacccccctccccacagccccagctgacgattcctcttcctttgaccctgccaattttccccttccccgaaagcatcacgatcctccaccagagcatcctgatcctccaccgtatgtccccactccagctctacctttctcccctcctctctccaaccaccctgcttctgactctgggtcctctctctctccacccctcaccccctctttggcccaagatgctcagcaaccagctcccttgcttcctcttcaggaagcagcaggagtcgagaggatcgtccgtgtccacgttcccttctccctctctgatctctcccaaattaagaaacgtctcaggtccttttcctccgatcctgacacttatatcaaaaagtttaaataccttacccaatcttacgaactcacttggcatgatctctacattatcctctcttataccctcctcccagaagagaagaaaagatgtggctcgcagctcaggcacatgctgatgatcttcatcggcaagatcctactaagcccgtagaggccgctgcagttacctgggaaaagccttcccgggagtaccaacccacaaaccccagccgagcatctcataaccacatgattacttgcctcattgcaggccttaacaaagctgcccataaggctgtaaactttgaaaadcttaaagaaatctcccaaaggcchgacgaaaatcccgcccaatttcttttccgccttacagaggccttccaaaaatatacccacgttgaccccgcctcccaggaaggaactattgttcttaacactcagtttatctcccaatccactcccaatatttggcgcaagcttcagaagcttgacgacagccctcaaaccccacaacgagaccttcttaatttagccttcaaagtctttaacaatcgtgatgaggaaagaaaggcaaaaacaggcagagtttcaaacgcttgcctttgccatcaggggccctgcaggccacgggacgcagctccacatggaagcctcctagcaattcacttccacctggcgcctgtttcaagtgcggcaatgaaggccactggtccagacaatgccctaacccagataagcccaccaggccgtgcccctctgcggaggacgccactggaagtcagactgtgagtggcccccgcaaggactgcccccatcccttcctgagccggccaaaacctcctactcagatctcatcggccttgccactgaagactgacggtgccctggaacggacgccccggcaactaccatctcttcatccgagccaagggtaaccctgatggtggcaggtaggccagtatattthtttttttcaatactgggacaacctactctgctttacctaatttttcaggacccaccgagtcctcccaggtctctgttgtaggaattgatggacaagtctccaaaccccgagccacccctccactcttctgttccctgcacaatttttccttcactcactctttcttagtcctgccctcatgtccaactccactcctaggcagagacatcctttcaaaattccacactactcatgtcttcctgtccaccgcaaccagagtccctcctgctcctctctgctagtccggcccctgacccctctccccagcacccgctacccacctctctcgttaacccagtagtgtgggacaccaccaccccttccatagctgctcaccaggaccccatcaaaatccagttaaaagacccctctaaatttcccaacattccccaataccccatttccctaacacaccaaaaaggcttacaacccatcataaacaagctctgctcacgccgtcttcttagaccaacacgttctccatataacacctccatcctccccgttaaaaaatctgacggctcataccaactcgttcaggacctccgagccatcaatcaggctgtcctccctattcatcccgtagtccctaacccctatacacttctctctctcatcccctccaacaccacccactacaccgcaattgacctaaaagatgctttctttaccattcccctacaccccgattcccaaaacctctttgctttcacccggaccgaccccgacaccctccagtcacaacaactcacgtggactgtcctccctcaaggcttccaggatagccttcttttcttcgggcaagccctagcccaagaccttgcctccttggatctttcccccagccgccttcttcaatatctagatgacctccttctctgtagcccctccctaaaaaactcccaaactcacactgccacccttctgaatttccttactaataaaggctatagggtctcccctctaaagaacagctttccacctccatggtgacctacttaggaattcaactttcccctggggcccgggctatgaccccagcccgagcggccttaatagataaataatctaccccgccctcttccaaaagcgaaatcctttccttcctagggctagcaggcttctttagaatatggattcccaactttgccctcctagctcaccccctctataaagcggccaaaggccctctcaatgaacccctaaacycctcacataacatactccccagcttccgcgaactccaaaccgctcttgtcactgcaccagctctgtccttacctaatatctcccaacctttcactctctatactgccaaaaaccgaggaatagccctcggtgtcttaggacaacagaaagaaaatcctccttcctttgcccctgtagcctacctctctaaacaactagacaacacagtcaaagggtggccaacctgtcttaaagtactagcagcggcagccagttttagctctagaaagcaggaaactaacattcagccaaaataccaccgtctacagtcctcataatctacaagatctcctctcctcccgagcattaagctcccttcctccttcccggattcaattactccatgccctctttatcaaaaatcccaaattcagtcttgccaaaagtgctcccctcaacccagcatccttactccccgtatcctcttcccttcctactcattcttgcactgacatcctagaccacctgcagccacactttccaaacatttcctccgagcctctcaccaaccccaatgatcaactattcatagatggctcctcttccgggcccactggctcccccaaaattgctggatatgcagttgtttcccttgaccaagtaattgaagctaagcccctacctccaggaacctcctcccaaaaagcagaactcataggctctcaccagagccctaaccctttccaaaggcaaacgagtcaacatttatacagactccaaatatgcctatcacattcttcattcccacgccgccatctggcaaaagagaggattccttactgccaaaggaacccccatcactaacggctccccttatttaccaactccttcaggctgcacacctcccaactaaagcaggagttatacactgttgaggacatcaaacaggttcagaaaggcctttgagggaacagattaatctcaagaggrarcasraargcyrayaaggcagcaragaacagaatctcaggagggatcagaaatgaaatctcaagagggaacagaaaggccgatgaggcagcaaaagaagcctccctttcttctgcccctgcctctctcctcctcattacccctgcaatccaacccaagwactctcccactaagaaaaggcttcactactacaacaaggaacctccttccaaggggactggatagtcaaaaatcaaaagctcgtcctcccccaagagcaaaccaaagaaattctgacatctcttcaccaatccttccatatcggtgcgcgccccctgtacctactcctttgcccttatttctcctcyccccayctattcacctcactaaaagacataacctcaaactgtcatatatgctctgttacttcctcccaaggggccctccrctctccatctattcctacacatcagctaagaggaacactcccaggggaggactggcaaatagacttcacccacatgcctcccgtcaagagaacaaaatttcttcttactcttatagacaccttctctgggtgggtagaagcatttcctacctcttcagaaaaggccgcagaagtctcccaaattcttgtaacagaaatcatccctagatttggtctccctggctccatacaatcagacaatggcccctagcttcatctcccaaatcactcaacaggtttctcagtcccttggcatccagtggcgtctccatatcccatgctggccccagacatccggaaaagtcgaaagggcaaatgggatccttaaggctcagttaaccaaactcactcttgaagtccaaaaaccatggacctcccttttgcccatagcactggagagcattagagccagtccaaaagcaccctccttcctcagtccatttgagttaatatacggacgccctttcctcttacaaaacaggcccccttctaactctcagctaggagaatacctcccaacagtctccctcatgagctatctcctctgccaacaagccgaccagggccctcccaaaaccccacgaaggcccttgacacctcccacctccttaacaaaaattcagggtactgtaatggccgacacctcccctatttatccctcttctcttggctcccctctccatacaccatccttaccctatacccaccacccgggacggtctccttctcccaacatccaacaacactcccacatgcatcttagtggacagaaaacgcttcctcttacactgggaaaaaaaaaaaagaacacaaaaagcctcccagcttaaaccaaacaccctttaacaaccacttctgacagcagccctagctgggaccctaagagtatggatgattgagaataacaaaatagtacatctttttagcatacacaaccagttccgtctaccaagccaaggcatacttttcctatgtgatacctcaacttatattgccctcccctctaactggcgaggcacctcagcaccctgcttttcctcagtccaaaaatcactgttgccccaggagaccagcccctactaatcccagttaatatccctatctgacacgacsatactatacaactcatacctctgttagtaaccctcagaataactacaggagttggaactgggattgtgggattaaccacctccgtttcctattaccaatccctctccaaagacttcacgaatagcttggaagagatagccaaatccattacaactctccaatcacaaataaattcttagcagcagtagttcttcaaaaccgcagaggcttagacctgttcacagcgaaaaaaggagaactctgcctttttctagatgaacagtattgcttttatcttaaccaatctggcgtgatacaggatactgtaaaaagactaaaggaccgagcacaaaaaattaaagaaaacgtcctctgatggccagcgtggccctcctggtcttttagtacctggtttccatggctactgcccctcctaggccctgccgtaaccatttttctctttctagcatttggcccttgtctcttacatctccttacccagtttttacagggccgtgtcagagccttcacccacggaacagtacaagacatgatgctactccaagaataccgacggctccaggaacagcagtccctactgtccagccttcccccccaaccatcgccccttcccagcaagaagcagccagaggacaacggcgcccctcttctattacctattaaaaggctggaa

SEQ ID NO: 29 - DNA, 6996 bp, Homo sapiens
  repeat_region (1)..(6996): hervg25
  misc_feature (1202)..(1202): n is a, c, g or t
  misc_feature (2310)..(2310): n is a, c, g or t
  misc_feature (6848)..(6848): n is a, c, g or t
  misc_feature (6902)..(6902): n is a, c, g or t
tattttggtgcattggccgggaaagaaaggrattcatcggaagggtgagtaggagtggacatttaattctttactttcattttggagkcttgtcctcagtttttttttttttcttctcaagaahcaaacaaaacactgggccyctgtyrgccagttaaaagctdttagdgcggctdccagccttaagactcaggggacaggcttgctggagaggahtttgtcaatcccccatcgcccthaggtgttgggaatgttggctctgttctaatccagtttcctttcacggagggcctagccgtcgcatggggctggaaggaggtcctggggcaactgaaggtttctggttgaggctacacctcagtgttacctgaaggcccctggactaactccagtccccgacagcccatgcagggtgtcggcaccaggacttccagtcttttctattkcattttcttcctttcttttctcgactatcatgtctcctatcccttctttgtatgcaatgttgtgggtgtttttacagcctggggatataatcttgttgagtaaagtcagtcagtgccttagtaatcagaaatgtaactcarwgaattgttgtytttgtgatttccttgaahtgaadaaattchaaatcctbdatctgtagacctwtttctcycccagtrataaacattcatggcactgtatgagrgratatttcaccctgagyaaatayccycctttgcatttaahhtsttttttttcctycatgtgaaarsycagcaytgtccaatgaatctaaacagycyytctatgagacaagttawtttttttstwctgggrcayatrctatrggracagcctatcaarccccaaacstctctttctaacttttgcctgaaaarwatwwagtyrgagtttttacctarcatttcagaccttacaggaccacctagtggratggggttkttctccatrggragccytgtcaaccctttgccccaaacctactgtytcccaattcttttctcttttaagtccctctgtcagtgatcagtccccatrccccatttywagccaagaaaattcaactttcaatagcccggaggaagccatcctgacaagacagattttagccywkakwctatctccatsraaggaargacagctattcaattcttacgttatccttraggcacctgttcttcatcmaactacattgnratttaaacaaaaaaaggattttatatttgaaagtcaactggtcccactctctgggattctratgtttccctggggccatagcaagggaagccaaagatagtgtttaggcactccctccattaaagtctgttgccyaaatccaactacgacataatctctccccggtccctggggtaccttgggagccttttgggctgagtgggtctaggaaaccagcagaatggaaaactaggacctkagacagatgagcacataactwgtcctgccacctacgtcctccagatctatgggtgaagatcatacttgcatccaygggtgaaacctatggtggttaccgagacccagaggwcaaggaagtgaagaggagaagggagatgccctttctctctttctctccaccctaggtcactcagaagggaaaraggagactaagggatgcctttgtctctcctctttttctagataggtaacaaaccatctacagtctacactcctctcaagtgcattctgaaacactggaactcctttgaccctgagactytgaagaaaaagcaacttatattctattrcacaagggcgtggycatcttaccarctrcargacagacgggaggcctggccttctcaggaaagtgttaattctaacactatycaacaactagatsttttctrcagayrggaggrcaaatggtccraggttccctatatacaadctttctttgccctgygagacaacccaratctttrtaagcattgtaaaattaaccctgccctcttgacagccatatcagacaatactacaaaagataattccccaaagtcagagacaaakacaacttctaggtgcctttcctgcyccccttatttgaggcccccatagccatatcatcagctcctccagttttgctacccaagaaacccctacattcactgttacctctacragaaatgcccatcagacakagkactactakggttcaagttcccttctcatcacaggaccttagacaaataaagggrgacctagcaaagttctctgakaaccctgatagatatatraaggctttccaaaatctamyacaagtgtttaatcttacatggagraakngtakackacttctaagccaaaccctaactactamcaagaaacagacraccctacagacaacaagaacattcagagatgaacattcctcctatgaccagtcraaaagagaacccagtcaaarttaaagaggwgaaaaagagacaagatcccaattcccaataggawgagaaacagtgcccctwgataatcctaatgagagccctagtgatcycatagatgratgagtagaaaagaaaaacactttckatgagacatattgaaagactkacaagaacacmgawccagacatcttaattactctaaacygtctatgttaaacaraaatccagataaaaatccctcagcctttatggaagggctgagaaaagctttrataaaacacacctccctkcctatcaattcagtaaagaacagatttattactcrracagcccctaatatcrtaragaagttrcagaaacagaccctgtccaaaaatctctctgrtttttctcaycctcaagttaaaactttacagtatataaatarcrctctcctctgtgccccaactraagatgtctcarrraagrcactgarrctctycttaatttcttarctgaaagrrcatatagggtctcaaaatctaargytcarctctatcaaacttcagtaaaatrcctaggtctagtcttatcagaagggacmagaacaccaggtgagraaaraattaagcccatttcctcytttccctttcccaaaactcttaaacarttgaggggattcttagacattactggattttrcaaattatgggtatstgggwatggtraaatagctaaycytttataccaccttataaaaaaaamctcaagcacctaaaactcactysctaacttgggaacctaaaactmaaaagccyttaaccaaytaaarcaagccttacttaaagcaccarccctcagtcttcccatarggaaggcatttaatctytatgtatcaaaaaggaagtkaatgaccctgggagttttaactaaggctcaaggtccagctcaacaaccagtgggttacctaagcaagaaacttgacttgatggctaraggatggccagcytgcctctgagcagttwyrgtggtggctctgctggtaccaraggccacsaagttaacmmtggggaataactgtytrcayyccacacaaataayaggactgctgtcctctaawggaadtctctggctaacaatcacctcctcaaatatcaaactttgytrctarrrkratctrcagtccrrttraaaacctgcccttgcctraacccagycactttctcccagargaaactaragarcctraacakrattgtraacagstartggtryaaactggtaaaagaaataagaagaatcactgtttatattctctgtaaagttttaattaattaaataaacatttttaaagtgtactcaacttaatgaaaagtgaatatccaagctataagtatattcaaaaagcctttctatttttatctttataaaacttgttttcctggaagaggdttttttctcacttaactgaattacttttatccactctttcttgtcactgttgatgcaagcatagaaggccctaaaataacctctggtggcctaagactcctcaagaaaacaaaaaagccaccacaaattvcattttrraaaaaatctctgctttttttcatrgaaaccctagaattaraaabaaataagtccctctcaaaatcwgcttttktcttctagctatgcttrtttrttaggccctggaaactatattcctagccctgttcttaaaaggcctcaaccagagaccaataatccaattagaaaaytggcaaacaaaaaatcttatagttactgaatyttcttctgtttgtbtagatggttatatacgtgwtktgtgtgatgtctataaaaaacctctaattaattggtgtacaaataagcacttrratcaaahattatttmaaaasaawataaaggctgtagtgcctcttggttcatgtaactttaatatttaavaaataaaaacattcttgtaaaatacaaacgtcttmaaaatgtaaataggtggtctaaattatgcaggtcaaatactaggtttgctaaatgttttaakgttgtaaactgcttctttggcctttaagtactgtcaacctgccagcttcacaattagtaaggcctggtgacatatdaaagtaaccatgcccctaactatactggaagaagtcagactttatctrmwyctagcacataattaaaacaacttaccaggttttacattaaagttaaaattacaaaaagttaccattataacatgtaattgagactactgaaaatggatttgcatgcaabgtgtgtaaaadcagtaaaattttttaataaaaaattataagaaggcataaaaatctacatttttcctaggagtaaaagattgtcttaaattaaataaagtgaaagttttaagcaaatttttgaaatactrtaaaaattaatytttwtttaamctaaattcaaaggaatatcatatggtgttcctttaaattaagcattkaaatgaaagcacaacaaarywytcttaaaatgctaatctrctctdtatcaaaatttctaaaagattataaaagatttgtaaamatcaaactggttaagattaaatararttatcyataarrkttcattaaaattgggrttaacattaatartaractartrcaargrkaaaatttrrctttytctyttwaacagrattttyaygtartartwargrcyaataaaagatwtttgctttttcaaatwtttraktcatkttrrcaaaayaartarcttatrrtaatctaaaaktctattyywtaakatyaamtgttttaramctctaacatattyaasaarskycccaaaatyaaacttcagtytcaagrttrtctttcctrayscmtrrcttttagrgcmcctararcatcaaaagaaagryaaacaarwtattkaayatrtttarrtasrtgggattgymaaaatgatrtyttyttyttcagwttatatttmrrtawataayattrayatatgttccaaaaytrtatrrrrtgtctaagrttctartgtmtamatatrtgctaycaatyawaattaaggttrttatrttrsrwtattrtaaamtcararataaccaaatttytttgtcartcgtgtcaracaattktcttgtttkaatcctcttaaaaatgrtttataatcarctrtrrgactttaayarrtrctmtcaaatrcagrtttctrataacagawaaamrtacrgaactcataaaaarctaaaatrtttayrratatcaarcagaacaaagttaayaraatrraytkarctaatrraaaactraarsaatgyttttaacttttrcttattaaaasttttaacmactragcaarryatactscttaaacawaatttrgamcwtrtytrtttctytttgcctggttcykctaraawtmaraaactadttataaatattyttaacttryarcaatatasytrtttrcatcadtdvaamaaaatccattttcttatgcaatgaaacacaatagaaaaaygctagttcttttacaagrctttaactggaagggtgtgttttcctttaagaaatcaagtttaagttgcaaagccagtaacagcctcttgggaaagctggtctcataccttgtctacacagtcctcatacagaattcctggcctgtggtgagtaaaaaaatgtcactttctaacagactcagaaacactatghtcttgggacctcaaaaatacaggagtttacccaactcacaaatatttaagggtacaaatccatggcttggcccaactttadaaagtcttatctaagatttcttttggaacagadttccatcaaagccttatbaaaaaggcctatggagagatagttactcttgctgcactatgttcaaatartyaggccaagtataataataaagtctattttgcaaacaattcartctatyrtgakttrtttttaacaaaaagaaaactaaaagaaagaaatyatgtttcaaadcttatcatacatttgtcattaaattctaatagttatkttttaagtttttghbtacattttaaactaaccctacttattcctgtgaaccaaccavhgatctcbvactvtaacttaaaaaaacaaaaaggaadggataatataaaaactaaaawmcgtctaattctagacaagtatcctacaaatcckaysrradaatgaaaataaataggatgcccataacccagaggtttatttatttagaaaadcaagaccaaagaaactaacaaagccchaatacacccaaatcttaacagacataattatavtcaccaattatcaggdbatatcaacagcctcaacatttttagdcttgtccttacccccgttgtctcattttaatacatgtcctctaataacccaaattrtttcttttyayctaaaaactatcaaactccaaatgrtaatrcaartgraatgatgcataaacacncctttcytctragracccttaaaccagcctcrrgaraartcctaactgctgttncctacacracacccctytccagcargaagtagccaaaawaatyawcgcycaatctccctaacarcagttggrgtctccactyctgagggaggac

SEQ ID NO: 30 - DNA, 7713 bp, Homo sapiens
  repeat_region (1)..(7713): hervh
tttggtgccttgactcggattgggggacctcccttgggagatcaatcccctgtcctcctgctctttgctccgtgaaaaggatccacctatgacctctagtcctcagacccaccagcccaaggaacatctcaccaatttcaaatctggtaagcggcctctttttactctcttctccaacctccctcactatcctttaacctctttctcctttcaatcttggcgccacacttcaatctctcccttctcttaatttcaattcctttcattttctggtagagacaaaggagacacatcttatccatggaccccaaactccggcgccagtcactgattagggaagcagcctttccttggtgtttaatcattgcagggatgcctctctgattattcacccaggtttcagaggtgtcagaccacgcagggacatctgccttggtccttcacccttagcggcaagtcccgcttttctgggagaggggcaagtaccccaaccccttctctccatgtctctaccccttctctgcttttctggggcaggggcaagaacccttcaaccccttctccttcacccttagcatcaagtcccgcttttctaggggggcaagaacctccaatcccttatttgcatgccctgacctcttatctctgcaccctaatcccttatttccgtgccccaacctcttatctctgcaccccaatcccttatttctgtgccccaacctcttatctctgcaccccaaccccttatttctgtgccccgacctctttcccgcttttctggagggtaagaacccccaaaacccctccctctgtgtctctactctctcttttctctgggcttgcttccttcactatggacaactttccaccctccattcctccttctcccttagcctgtgttctcaaaaacttaaaacctcttcaactcacacctgacctaaaacctaaatgccttattttcttctgcaatgctgcttaaccccaatacaaactcgacagtagttccaaagagccagaaaatgggactttcaatttttccatcctgcaagatctaaataattcttgtcgtaaaataggcaaatggtctgaggtgtctgacatccaggcattcgtttacatatcactcccttcctagtctctgtgcccaatgcaactcatcccaaatcttccttctttccctcccacctgccctctgagtcccaaccccaagcattgctgagtctttctaatcttccttttctacagacccatctgacctctcccctcctcaccaggctgagctaggtcccaattcttcctcagcctccactcctccaccctataatccttttatcacctcccctcctcacactcagtctggcttacagtttcattccgtgactagccctcccccacctgcccagcaatttcctcttaaaaagttggctggagctaaagacatagtcaaggttaatgctcctttttctttatctgacctctcccaaatcagttagcatttagactctttttcatcaaatacaaaaaacccagcccagttcatggctcattcggcagcaaccctgagacgctttacagccttagaccctaaaaggtcaaaaggccgtcttatcctcaatatacattttattacccaatctgctccaaacattaaataaaactccaaaaattaaattctggccctcaaaccccacaacaggatttaattaacctcaccttcaaggtgtacaataatagaaaaaagttgcaattccttgcctccactgtgagacaaaccccagacacatctccagcacacaagaacttcgaaatgcctcaacctcaggtgccaggggttcctccagaaccttctcccccaggagcttgctacaagtgccagaaatctggccactgggccaaggaatgcccacagaccaggattcctcctaagctgtatcccatctctgtgggaccccactaaaaatcagactgttcaactcacctggcagccacttccagagcccctggaactctagcccaaggctctctgactgaccccttctgagatcttcttggcttagcagctgaagactgacactgccagatcgcctcggaagcctacaggaccatcacagatgctccaggtaactctcacagtagagggtaagtctgtccccttcttaatcaatatggaggctacccactgcacattaccttcttttcaagggcctgtttcctttgcctccataactgttgtgggtattgacggccaggcttctaaacctcttaaaactccccaactctagtaccaacttagacaatactcttttaagcactcctttttagttatccccacttgcccagttcccttatgaggccgagacacttcaactaaattatctgcttccctgactattcctggactacagctacatctcattgctgcccttcttcccaatccaaagcctcctttgcatcttcttgtatcccccaaccttaacccacaagtataagatacctctattccctccttggtgaccaatcatgcaccccttaccatctcattaaaacctaatcactcttacccggctcaatgccaagatcccatcccacagcatgctttaaaaggattaaaacctgttatcactcgcctgctagagcatggccttttaaagcctataaactctccttacaattcccccattttacctgtcctagaaccagacaagccttacaggttcaggatctgtgtcttatcaatgaaattgttttccctatccaccctgtggtgctgaacccatatactctcctatcctcaatacctccctctacaacccattattctgttctagatctcaaacatgctttctttactatccctttacacccttcaacccagcctctcttcgttttcacctggactgaccctgacacccatcagtcccagcagcttacctgggctgtaatgctgcaaggtttcaggggcagcccttattatttcagccaagctctttctcatgatttactttctttccacccctccacttctcaccttattcaatatattggtgatgttcttctttgtagcccctcctttgaatcttctcaacaagacacacttctgctccttcagcatttattctccaaaggatatccccctccaaagctcaaatgtcttctccatccgttacctaccttggcataattcttcataaaaacacacgtgccctccctgctgatagtgtctgactgatctctcaaaccccaaccccttctacaaaacaacaactcttttccatcctaggcatggttggatactttcgtgttaggatacctggttttgccatcctaacaaaaccattatataaactcacaaaaggaaacctagttgaccccatagatcctaaatcgtttccccactcctctttccattccttgaagacagctttagagactgtctccactctagctctccctgactcatcccaacacttttcattacacacagctgaagtgcagggctgtgcagtcagaattcttacacaaggaccgggatcgcatcctgtagcctttttgtccaaacaacttgaccttactgttttaggctggccatcatgtctccatgcagcgtctgctgccaccctaatacttttagaggccctcaaaatcacaaactatgctcaactcattctctacagctctcataatttccaaaatctattttcttcctcacacctgacacatatactttctgctccccggctccttcagatatactcactccatttattctcccacaattaccattattcctggcctggacttcaatccggcctcccacattattctggataccatacctgaccctcatgactgcatctctctgatccacctgacgttcaccccatttccccacatttccttctgccctgtttctcaccctgatcacacttggtttattgatggcagttccaccaggcctaatcgccactcaccagcaaaggcaggatatgctatgaactagttgccttaattcaagccctcactcttgcaaaaggactacgtgtcaatatctatactgattctaaatatgcctttcatattctgcaccaccatgcggtcatatgggctgaaagaggtttcctcactacacaagtgtcctccatcattaatgcctctttaagaaaactctgctcaaggctgctttacttccaaaggaagctggggtcattcactgcaaggggcatcaaaagacttcagatcccattgctctaggcaatgcttatgctgataaggtggctagacaagcagctagctctccaacttttgtccctcatggccagtttttctccttcacatccgtcactcccacctactccacagctgaaacttccacctatcaagctcttcccccgcaaggtaaatggttcttagaccaaggaaaatatctccttccagcctcacaggcccattctattctgtcgtcatttcataaccttttccatgtaggttacaagccactagcctgtctcttaggacctctcatttcctttccatcatggaaatctatcctcaaggagatcacttctcagtgttccatctgctattctgctacccctcagggattgttcaggcctcctccctttcctacacataaagctcggggatttgcccctgcccaggactggcaaattgactttactcacatgcctcgggtcagaaaactaaaatatctcttagtctgggtagacactttcactgggtgggtagaggcctttcccatagagtctgagaaggccaccgcggtcatttcttcccttctgtcagacataattccttggtttggccttcccttctctatacagtctgataacggaccagcctttactagttaaatcacccaagcagtttctcaggctcttggtattcagtggaaccttcatatcccttaacatcctcaatcttcaggaaaggtaaaaccgactaatggtcttttaaagacacacctcaccaagctcagcctccaacttaaaaaggattggacagtacttttacctctcgcccttctcagaattagaacctgtcctcgagatgctacagggtacagtccatttgaacttttatatggacgcactttcttgcttggtcccaacctcatcccagacaccagccctctaggcgactatcttccagtcctccaacaggctaggcaggaaagtcaccaggctgctaatcttctcttgcctactccagatccccagccatatgaagacactctagctggacgatcagttcttgttaagaatctgacccctcaaactctacaacctcgatggactggaccctacttagtcatctatagtaccctgactgccgtccgcctgcaggatcctccccactgggttcaccattccagaataaagctgtgtccattggacagccagcctaatccctcctcttcctcctggaagtcgcaattactctcccctacttcccttaaactcactcgtatttctgaagaacagtaataacccttatgagcctaatacatcccttcattctattaggtctgtttgtccttaccctactttttgcaacagggctttatgaactcacccccaccacttaggctgagcccaaaaaatcttgtcatccctactattttctgtccagtcatactcctattctctgctctcaactacttataaatgccgtactcttgtttacactgctggtttacactgtttcttcaagccatcacagctgatatctcttggtgctatccccaaaccgccactcttaattccctcttagagtgggtagatgatctttgctggcagggcaccctccaatacttccaccctgatgaagttctattctttacttttatactctctcttattctcattcccattcttatgccaccttttgcctctccccagctatctccaccacactatcaaccttacccattctctcctagctgcttctaatccctccttagtgaacaactgctggctttgcatttccctttcttccagtgcctacatagctgtccctgccttacagacagactgggctacatctcctgtctccttacacctctgaacttcctttaacagccctcacctttaccctcctaaggaactcatttactttctagacaggtccagcaagactttcccagacatttcacatcagcaagctgccgccctcctccgcacttatttaaaaaacctttctccttatattaactctactccccccatatttggacctctcacaacacaaactattattcctgttgctgctcctttatgtatctcttggcaaagacccactggaattcccctaggtaatatttcaccttcttgatgttcctttactctttatctccaaagcccaactacacacatcactgaaacaattggagccttccagctccatattacagacaagccctctgtcaatactgacaaactcaaaaacattagcagtaattgttgcttaggaagacacttaccctgtatttcactccatccttggctaccttccccttgctcatcagactctcctcccaggccctcttcttgtttacttatacccagcccccaaaataacagtgaaaggttgctcatagataatcaacgttttctcgtacatcatgaaaattgaacatcctcctctatgcagttaccccatcagtccccattacaacctctgacagctgccgccctagctggatccctaggagtctgggtacaagacacccctttcagcactccttttcacttttttactttacatctccagttttgcctcacacaaggtctcttcttcctctgtggatcctctacctacatgtgtctacctgctaattggacaggcacatgcacactagttttccttacccccaaaattcaatttgccagtgggactgaagagctccctgttcccctcatgacactgacatgacaaaaaagggttattccactaattaccttgatggttggtttaggactttctgcctccactgttgctctcggtactggaatagcagtcatttcaacctctgtcacgaccttccgtagcctgtctaatgacttctctgctagcatcacagatgtgccacaaactttatcagtcctccaggctaaagttgactctttagctgcagttgtcctccaaaaccgctgaggccttgacttactcactgctgaaaaaggaggactgtgtatattcttaaatgaagactgttgtttttacctaaaacaacctggcctggtgtatgacaacataaaaaaactcaaggaaagagaccaaaaacttgccaaccaagcaagtaattatgctgaatccccttgggcactctctaattgcatgtcctgggtcctcccaattcttagtcctttaatacccatttttctccttcttttattcggaccttgtatcttccatttagtttctcaattcatccaaaactgtatccaggccatcaccaatcattttatacgacaaatgtttcttctaacaaccccacaatatcaccccttaccacaagatctcccttcagcttaatctctcccactctaggttcccatgccacccctaataccgcttgaagcagccctgagaaacatcacccattctctctctccataccaccccccaaaaattttcactgccccaacacttcaacactattttatttttcttattaatataagaaggcaggaa

SEQ ID NO: 31 - DNA, 5120 bp, Homo sapiens
  repeat_region (1)..(5120): hervh48i
tattttggtgctgaaatctgggaggggctcaggtctgcatcccccatggacctagccctccaccccaaagagcaggccacagcagctggacaaaggaaggtcctcagcctccagtcgcctctctgtgcatgcagtcggtcactgatctcgcctactggtaagtttccccagaagcccagttaacagagaaaaatctgcacagcctctcttggtttctccagtccaaagccccaacattggtccaagaaggctctggcatgtgccaggcacccgataattatctagtcttaaggggacgcctctaagccatttaatcctgttccaggaacaaaaaaggcagcagtgatgatggctccttttatcttctccctccggctgtccaggatggcctccttttccctgttctcccaagcccaccctcccttatgggaaactcccggtcctctgttccaaaaaaaaaaacagtcctctaggctgcctcataaaaaaacctgcaaacattaggcctcaagctagatatgtgccctaagcgccttgtctttttttttttttttttttttttttgcaattcagtctggccacaatatgaattaaataatgggtccaaatggcccgcaaatggaacattcaactttgcaattctaacttatttaagcaattaatgctgacgactggagaaatggcaagaaattccttacgtccaggcctttttacactcagatcacaacctgtcctctgcaattcttgcttatctgttcaaatccttcccctccattctagccgccctaatcacctttctcctcccaaccgtacctctttttttctcattaaatccagcagactgctgtccacccctcccagcccctacctcttcctctcaaccatcttctttaaccccccaagcctcctcattgtcttctcagctgccatcttcccagtcagctgtatccacttatttttctacaccgtcccctcctcagaacaattctaatattacctatacctattctcctccccaacgccctctcctgaggcttgtaaacctatcctgccaccttacgcctctgtctatcctccactgcctattaactcaaccgcgctttccccttcaaaccctcagaaggaatcagtattttaaaccttcagttcatctcctaatccacccccaatgtttggctcaagctccagaagcttgacgacggccgtcaaaccccacaacaagtccttcttaatttagccttcaaagtcttcaacaattgtaatgaggaaagtaaaaggcaaaaacaggcagagtttcaaatgcttgcctccaccatcaggggccctgcaggcccacggggccgcagctccacacagaagcctcctaaaaatccacctccacctggcgcctatttcaagtgtggcaatgaaggccactggtccagacaatgcccaaacccaggtaaagccagcagtccatgcccctctctgcggagaaccccactggaagtcggactgtaagcagctcccacaaggactgcccccatcccttcctgagctagccaaaacctcctacttatatctcatcggccttgccactgaagaatgatggtgccctggaacagacaccctggcaactacctttgcctcatccaagccaagggtaaccctgatggtggcaggtaggccagtatatttttaaattaataccaggcaacctactctgctttacctaatttttcaggaaccacccagtcctcccaggtgtctgttgtaggaattaatggacaagtctccaaacctcgagtcccccctccacttttctgctcccttcacaccttttccttcactcactctttcttagtcctgccctcatgcccaactactctcctaggcagaaatatctttccaaaactccacactactttccacttccacattccccatagtacccaacacatcaacccagacccctctggggcttctaactttcttctactcctccaaccacccaccttaaaacgtgcaactttttcttgtcccccatctgtagttaaccccgctgtttaggatacttccacaccctcagtcgcaggacaccacacccctgtccacaatacccttaaatagcccacccagttcctatcacagaagtagtatgccatcccccaagtagctctcataagcctaaagcctatcatttctcgtctcctctccagtcacctactctgcccaacaaactccccttttaacacaccagttctacctgtgaaaaagctagatggagcttatcacttagtctaggacctcaggctcattaaccaagctgtactcccagtatgtccagtagttccttacccatatactttactttccacaattccctccgataccactcatttttctgttctaaacctaaaggatgcttttttttcataattcctttacactctgattcccaaaacctcttttcctttatgtggaatacccccgacacccacctttcatgtgagctcacctggtgcatactacctcaaggtttcagagacagcccccacttttctgtgtccaaaaggcccttgctcatgacctctgtagcttatccctaaagctgtccactctctttcaatgtattaatgatctgctcctgtgtagcccctctcaaaaaaactgcaactaccatactatctctcttttaaacttcttcccaaaatgcgagtattaggtctcccctaaagaaacaaaaatatgcacccccctcagtcacctatctatgcctaactcttaccccatgaacctgagagctcacaaccgaccacatatccctcctccagtccctcctgcctccgcaaactaagcaaaaaaatctctcttttctaggactagtgggatattgtaggctctgggttccctccttcgctctatctgccaaaccattataccaggctgctaaaggccctctctatgtgccattaaactctgcacagcctattacccaacctttccatctactccagaaggctctcacctcagcctcatcctcactctcccagacctcaccaaacctttctccctctatatcgacagatgatgtaaagttgcattatgtattctaacccagtctaagggacctaccgcccaggttgttgcctacctctctaaacagcttaaagccaccattctccgatggcctgcctgccttcaagcattggtggcagctgctgtcctcacccttgaaagcctaaaactatctctccatgccaacctaacagtttattcaacccataacatcaaaaacatgttagctcactgcagtgtactaagtctcatctctgccccatggctcctccaactgtatgctctattcatagaaaaccccctcctaccaatcaccatactaaccagctcccgtctaaacacagccatgctcttacctgaagttacaaccgcccaagaccctacacacttctgtgtaaacactgttcaaaccttccttataccttttccaaacctaacagaacaaccctttccagatgccccctttacttagtttgtagatggcagctccttcctacatcaaggacgctggcatgctggctatgctatagtgtcaccccacacacacacactattgaagccaatctgctcttgctaagcaccacctctaaaaaagctgaactcgtcgctcttcctcaagctctcactctagcagccagacaacaaatcaacatatattcaaattctcgttatacattctacatagtgtactcacactcgtccatctggaaaaaacgaggcttcctaattgcaaaaaacactcctgccataaatggctctctcatcagcaaactccttcaagctgccaggcttctacagaaagttgccatcatttattgcaggggccaccaaaccccggatgatcctatatcagctggaaataggctagcagatcagataaccaaacaagtagccctccaacccatgcaaggccagtttctgtccctgtcctttttctctcctctttactcctcagaagaaaaggaggacttccaagcccaaaaccttcaaaagcaaggaccatggtatgtcaaggaaaggtgctttattcttcctcactctcaaagccttcctcacctccaaagcctccacaaccctttccatatcagttacaacctctcttgcaacttctctgccctattctcacttgccctcacctttccagccatgtttgagaaattacctagtcctgctctgtctgccactcagtgtcaccccaaggctccttccagccaccttttcctacccaccaagcccagggccaggtacccaggcaaaattaacaaatggacttcactcacatgctggccaataaacggctccactatcttctagtctttatctgtactttctccaggtagataaaagcattcccaacaacttcagaaggtataaatgtcatcacacaaactctcttcatgcatataattctccgttttggacttccaacattcatccagtccaacaacggaccctccttcatcagccaaattatccaaggcatctctacatccttaggtataaaatgggttctccacacaccctataggcctcaattctcaggcaaagttgaaaaaattacgtctgtccttaaagcccaactcaccaagctggctctaaaaactcaccagtcgtaaacaaaaaatctccctttcacccttataagactccacacaacaccaaaagcaccctctttttatagtccctttgaaatcatatatggccaaacttttgtcttggggtctccacccttaccagactctgagccactcagatattacctctcctccttaatccagacatggtctttcattcgtgaagcagcaaataaggccatgcctctccctgttaacacctttttgtcctctgaacgtaactgtcttacaggcacagacgtgtttccagacaatccagatgatgcttctgctacagcgacatggtaaataccaacccgtctctcaacaatacccccaaaattaagattttctttttccaagatgtccacgtcaccccctatgtcatgcctgaagtaattattgagtaagtggtcccttttcccttttctctaaccaaatagacaggaa

SEQ ID NO: 32 - DNA, 7785 bp, Homo sapiens
  repeat_region (1)..(7785): hervi
  misc_feature (7232)..(7232): n is a, c, g or t
aatttggtggcccatacagggaaaacattgtcctccgggaaagggttctttgatcatcctcttgagaggagaacacatcccactgtccttgttgcggtggcctcatgagtaggaatcgagacccacctgtctgatgaataaccccagactctcaacaacgtggggagaaaaagacttgcaacactatggtggccaggtaactctgtgcgcagaccaaggtaagaaatgtcgcaggagtgacaaagtacttccttggtggtcactatattctggtggctgaaagttcatgaatggtaacaagtgctactgctgtgtggagtgaatgagtccaatctgtgggtctatggttacctcatacggcttagccttctctgaaggatcctgatgttggggtttatatagtcctcccaatgctaagcgggacttaaaatattcctaggaggaaagtggccagagtggatgaagcaaaaggagaagagtgtgaagaacctccaggaggtggggctaaaagataggcaagaaatctctaatacgagggattgagccacagaaagctccagacagataaaaaagaaattcctaatatgaggaactgagccacagcaagcctccagcaggcaacaaatccctaatatgagggattgagcctagctaagacccaatatgggaaataccccaagaaagacagagaataagaaggatgaaaatagtaacaaggatataccccttgatagtcccctaggtttcatgttaaaatactggaaagataatgagaggactaagcataagaagaaggagcaaatgataaaatattgctgtttcatttggacccaaggtcccatcctcaaaccctcaatcttctggccaaagtatgggtcgaatgagggtgtaatgagtcaactcctaatccaatatgttaatgataaaagtctggtttctcaagaagaactagactatgctctttgttggaagcagggacctgtcctcctctttcccttaaagacaactagggaagaatccgatccagcatctcaaattgagaagtcagacaagccgactcccacacctaaagtcagcacatgggatcccctagactgtcttcctttgcttactgccccaatcctaacccccctactcctcaggcagctgctgctgccccagatcccatcccagattcttccccaactcatgatgttcctcccgcttacaaccctgactctcaggggcagtcgtcccaagagcctgttcattgccaacctaaatatccttccttaaaagggctccaacatgaaatagagcagtgtaaaaaggacattcagaactccccttttctttccacacctaaggagtcagccataactttcttccctttaaaaggggtatcacaaggaggggaagtcattggttttgtaaatgctctcttgactatttcagaagtctgaggtctgaagaaagaacttaagccactgctagatgacccctatggagtggcagatcaagttgatcaattcttagggacctcagttatacacttgggtcgagcaaatgtctatcctaggctcttcttttcaggggaggaaagaaagcatgatccgtagggctgctatggcaatttgggaacatgaacaccctcctggtcaaaacgttcctactgtggaccaaacatttgctgcccaagcaagactcctggtgggacaacagcaatgcagcccactgagaaaacatgcaggacctaagggaaataataataaaaggaatcagtgaatccatacccagaactcaaaagctctctaaagcatttgatatacaacaggagaaagatgagggacctataagattcctagacagactaaaggagcaaatgaagcaatatacaggtctgaatttagaagatccccttgggcaaaggatgttaaagatccattttgtcactaaaggctggccagatgtttcaaaaaagttacaaaaattggaggactgagaaaaccgacctctaagagaacttctcagagaagctcaaaaggtgtatgtgaggagggacagggaaaaacaaaaacagaagtcaaaaccaatgttatctactttccagcaggtggctccaaacccatatgctactaaatgaggcttccagggagccagaaactataaaaggtcccaagcctcccaaacccagtttagagaaaccaaaccttcagctagaggacccaagtctacatttcccaggccccctaaagagcatagaaaagcaagaccaaaaaatcccaaaactgagagaggggaaggacaagataagtgttacaaatgtggaaggacagcccccttcaaaagagaatgtcccaaattagaaaaggagagagaagcccttccactcacgacctttgaagaggaacagggaagtcaggggctctgtctatattatcttgagtcccaccaggagcccttgataaatttggaggtgggacctacacatgagcttatcacatttttggttgattcaggagcggcctgttcctctgtttgtttcccctcatctaatgttgcctgctcttcagaagaacttatagtctctgagataaaaggggaaggatttacggtgagaatcttagaaaatacagaagtcaagtaccaagactaaacaacccaggttcaatttttgttaatccctgaagcagcaactagtttgttaggaagagacttaatgttaaagttaggcataggcctacaagtcagcccaaagggattccttacttcattaaacttactcaccacggcggatgagaaatacattcatcctgatgtttggtcaagggaagaaaactgaggaaagcttcgaattctcccaatccacatcaagctaaacaccccgcactgggaagtagtgaggaggaagcaattccccattcccttagagggcatgctagggctaaaacctataattgaaagtctcattaatgatgggcttcttgaaccctgtatgtctccttataacaccccaatactgcctgtcaaaaaatcagatgggtcataccggctggtgaaagacctcagagccattaaccaaacagtccagaccactaaccctgttgtccccaacccttacaccattctcagcaaaattccatataatcatcaatggtttactgtaatagatttaaaggatgctttttgggcatgtccctggctgaagagagccgagacacatttgcctttgagtgggaagatccccagttagggtgaaaacaatggtatcaatggacagtcttgcctcaggggttcatggattcacccaacctttttggtcaaattttagaacaagtgctagacaaagtttctgttccaaaacaattatgcctgcttcaatatgtcgatgatattctcatatctggtgaggatatagagaaagaagctggcttctctacacatatttttgaccatctacagttcgaggggttacgggtctcaaagggaaagcttcagtgtatggaacctaaagttaaatatttaggccgcttaataagtgcgggcaagcgaaggatagggcctgaatgggtcgaaggaatcgtgtccttacccttgcctcagactaaacaggaactcaggaaatttttagggttagttggatactgccgcttaaggattaactcacatgccctaaacagtaaacttttataccaaaaacttgcccagggaaaacctgagcatctcctgtggacttctaaagaggtcgatcaggtcaaagagctaaaaggaatagcttataactgctcttgccctagccttaccttccctagaaaatacacttcaccttttcgtcagcgtgaaaaatggggtggctttaggggtgcttatccaagagcacagaggctgctggcagcccatggccttcctgtcaaaaattttggacctggtcacctgtggatggcctcagtgcatccaatccattgcagctacagcagtattagttgaagagagtagaaaattaacctttgggtggagattaacagtaagcacaccccaccaagttagagagctattttaaataaaaaagcaggaaggcgactaactgactccagaatcttaaaatatggggctattctactaaaaaaagatgagagaacacctatgtctagatttaattgactaccaaacaaaactcaggccagatctaggaaagatccctttcaaaacaggacggcacttatttatagatggttcctcccagctgattgagggaaaaagacacaacgggtatccagtaatcgatggagaaattctctatgtataagaacagagtcaagaaaattgcctaataattggtctgcccaaacttgtgaactgtttgcactcagccaagccttaaagcacttgcaaaaccaggaaggaaccatctatactgattctaagtatgcctttggagtggctcatacatttggaaaaagttggactgaatgtggcctcactaatagtaaaggtcatgaccttgttcataaggagttaatcatccaagtactggataaccttcagttgccagaagaaatagctattgtccgtgtacccgggcaccagaaaagcctttcttttgaaagtcgaggaaataacctaacaaaccagatagccaaacaagctgctgtttcctccgaaacacctatgtttcacttaactccttgtcttccttcccctactgcaatttcctttttctcttccattgaaaaagaagaataaagataggagccaaaggagaagaccagaatgaaaacggctgttactagaccaaaaggaaatgttatccaagcccgttatgtggaagatctagtctcaactatatctgaggacacactggggatcccaagccatgtgcgatgcagttctcagggtctatggatgtataagaatttacaccctagccaaacaagttacagatagttgcttaatatgtaaaaagactagtaagcagattctaagaaaaccgccccttggagaaagagattcagggctaagaccatttccaagtgttcaattaattatactgaaatgcccccaattggtcatttaaaatacttattagtaataatagaccactttacctactgggtagagactatcccacactcaaatgcaaccaccagtaacgtagttaaggcattaattgaaaacattgtacccagatttggactaatacaaagcactgattcagacaatggaacccatttcactgcatatgtcattaaaaagttagcccaggtactagacataaaatggaaaaaccatatcccttggcatctctcctcctcaagaagagtagaaaggatgaatcagactctaaaaagccacttaactaaattagttctagaaacttgattgccatggactaaatgtcttcctattgccttgttaagaatccgaactgctcctcagagagatactggcctttccccttatgagatgctctatggattgccctatttatactccactgctaacattcctacattcaaaataaaagatcagttcctcaaaaattatatacttggtccatactctactttctcttcccttaagactaaaggtctcctagcacaggcgccaccgctggagtttccagcacattagcgtcagcctggagaccatgtcctcataaaagggtggaaggaaggcaaactcaaaccagcttgggaaggaccctacttggtgctcctaaatactaagactgcagtccgaacagcagaatgaggatggactgatcacacccgcgtcaaaaaggcgctgccacctccaggatcataaaccgtcactccagggctcaccccaaccaaattaactctaaaaagggcttaataatcacttgtttattttttcttttctttccaacagaaggtcatcttgtcatcaatgtaacttgggctaaccatcctttaatccttcagtttgatgcttgttcagtcatcctgtgtggagacaagcaagctcaaaggaagctgtctcatgtagataagtacctatgtccataccataaaaagtcaaccaagtataagtatagaaccttaaaaagtccctgtggtgactggacagatgtttggaaaccactcagtatggagggtggacagccaggcccccttttcaaataagttatggggactaaaacagaaactccaactaattcatggtcccaccccaccaaactgtaagccactgcagtgtaacccctcattgctaattatagctaacccccaaacaatggcccaagaacccactatattcaaacagtatggattaggagcaaatgttacaaaacaaaatcccataaaaatcttcaaccactggttaacaatgataattaaaaaaaaatccacacccagagtctgggaaacgagtggaatctaacactctctccaagtatagcgagctcagcgtcctcctcccatctccaaaacaacccaactaaagtaacggttgtaaaggtaaaaaatttaaagcagactatagccctagagacaggatgtcaagatgcaaatgcttggctaaaatggattaaatattccatctgcactttaaacaaatatgaatgttatgcttgtgctcacggtagaccagaggcccagattgtcccctttccactcagatggtcttctaactgaccgggcataagctgtatggtagttctcttccaagatcacacagcctggggtgacaaatcatgtcaagctctttctctgctgttccctgaagctcaacaccctgagggtcagcccccgagggcatcagcttccgtttcccaatgccaattttactttgtgtctctcacaacagggagaaaacttggtgttccttggagccttaatgggatgcagtgagcttaagtccttccaagagcttacccatcagtctgcccttagtcatcctcgagcggatgtatggtggtattgtggtggaccattactggacactgccgagtaactggagcagaacatgcactctaattccattggctatccctttcaccctggcatttcatcaaccagaaaagatagaaaccaaacactgtaaaacaagagaggcccctcatgggtctgttgactcccacatttatatagattccactggagtccaacgaggagtgccagatgaatttaaggcccaaaatcagacaactgcaggatttgaatccacgttcttctggtggttaactataaataaaaatgtgaattagataaactacatttattacaaccaantatgatttgttaattatactagagatgctcttaaagggacagctgaacaattaagacccaccagtcaaatggcctgggaaaataaaatagcattagacatgataccagcgaaagaaggtggagattgtgtcattatcggaacccgatgctatacttttatccctaataatactactccaggtgggatcacaccaaaagcactacaaggtcttaccgccttatcaaatgagctagccaaaaattctggactaaacgaccccttcacaaatttaatgggaaattctttggcaaatggaagggatttatgtcctcaatcctcatgtctcttgccatcagaatagggttgcttattcttgtaggatgctgtgtcataccctgtgccctaggattaatacaaaagctcattgaaacagctctccccaaaacctccctcaatcctcctcctcctcgttccagtgagctttttcttttagaagacccaagtagaataacagagccaaattatgttaaaagggtttaagaaaaaatactgtaaaatatttaacagggggat

SEQ ID NO: 33 - DNA, 7242 bp, Homo sapiens
  repeat_region (1)..(7242): hervk
ctggtgcccaacgtggaggcttttctctagggtgaaggtacgctcgagcgtaatcattgaggacaagtcgacgagagatcccgagtacatctacagtcagccttacggtaagcttgcgcgctcggaagaagctagggtgataatggggcaaactaaaagtaaaattaaaagtaaatatgcctcttatctcagctttattaaaattcttttaaaaagagggggagttaaagtatctacaaaaaatctaatcaagctatttcaaataatagaacaattttgcccatggtttccagaacaaggaacttcagatctaaaagattggaaaagaattggtaaggaactaaaacaagcaggtaggaagggtaatatcattccacttacagtatggaatgattgggccattattaaagcagctttagaaccatttcaaacagaagaagatagcatttcagtttctgatgcccctggaagctgtttaatagattgtaatgaaaacacaaggaaaaaatcccagaaagaaaccgaaagtttacattgcgaatatgtagcagagccggtaatggctcagtcaacgcaaaatgttgactataatcaattacaggaggtgatatatcctgaaacgttaaaattagaaggaaaaggtccagaattaatggggccatcagagtctaaaccacgaggcacaagtcctcttccagcaggtcaggtgctcgtaagattacaacctcaaaagcaggttaaagaaaataagacccaaccgcaagtagcctatcaatactgccgctggctgaacttcagtatcggccacccccagaaagtcagtatggatatccaggaatgcccccagcaccacagggcagggcgccataccatcagccgcccactaggagacttaatcctatggcaccacctagtagacagggtagtgaattacatgaaattattgataaatcaagaaaggaaggagatactgaggcatggcaattcccagtaacgttagaaccgatgccacctggagaaggagcccaagagggagagcctcccacagttgaggccagatacaagtctttttcgataaaaatgctaaaagatatgaaagagggagtaaaacagtatggacccaactccccttatatgaggacattattagattccattgcttatggacatagactcattccttatgattgggagattctggcaaaatcgtctctctcaccctctcaatttttacaatttaagacttggtggattgatggggtacaagaacaggtccgaagaaatagggctgccaatcctccagttaacatagatgcagatcaactattaggaataggtcaaaattggagtactattagtcaacaagcattaatgcaaaatgaggccattgagcaagttagagctatctgccttagagcttgggaaaaaatccaagacccaggaagtacctgcccctcatttaatacagtaagacaaggttcaaaagagccctaccctgattttgtggcaaggctccaagatgttgctcaaaagtcaattgccgatgaaaaagccggtaaggtcatagtggagttgatggcatatgaaaacgccaatcctgagtgtcaatcagccattaagccattaaaaggaaaggttcctgcaggatcagatgtaatctcagaatatgtaaaagcctgtgatggaatcggaggagctatgcataaagctatgcttatggctcaagcaataacaggagttgttttaggaggacaagttagaacatttggaggaaaatgttataattgtggtcaaattggtcacttaaaaaagaattgcccagtcttaaacaaacagaatataactattcaagcaactacaacaggtagagagccacctgacttatgtccaagatgtaaaaaaggaaaacattgggctagtcaatgtcgttctaaatttgataaaaatgggcaaccattgtcgggaaacgagcaaaggggccagcctcaggccccacaacaaactggggcattcccaattcagccatttgttcctcagggttttcagggacaacaacccccactgtcccaagtgtttcagggaataagccagttaccacaatacaacaattgtccctcaccacaagcggcagtgcagcagtagatttatgtactatacaagcagtctctctgcttccaggggagcccccacaaaaaatccctacaggggtatatggcccactgcctgaggggactgtaggactaatcttgggaagatcaagtctaaatctaaaaggagttcaaattcatactagtgtggttgattcagactataaaggcgaaattcaattggttattagctcttcaattccttggagtgccagtccaagagacaggattgctcaattattactcctgccatatattaagggtggaaatagtgaaataaaaagaataggagggcttgtaagcactgatccaacaggaaaggctgcatattgggcaagtcaggtctcagagaacagacctgtgtgtaaggccattattcaaggaaaacagtttgaagggttggtagacactggagcagatgtctctattattgctttaaatcagtggccaaaaaactggcctaaacaaaaggctgttacaggacttgtcggcataggcacagcctcagaagtgtatcaaagtatggagattttacattgcttagggccagataatcaagaaagtactgttcagccaatgattacttcaattcctcttaatctgtggggtcgagatttattacaacaatggggtgcggaaatcaccatgcccgctccattatatagccccacgagtcaaaaaatcatgaccaagatgggatatataccaggaaagggactagggaaaaatgaagatggcattaaagttccagttgaggctaaaataaatcaagaaagagaaggaatagggtatcctttttaggggcggtcactgtagagcctcctaaacccataccactaacttggaaaacagaaaaaccggtgtgggtaaatcagtggccgctaccaaaacaaaaactggaggctttacatttattagcaaatgaacagttagaaaagggtcacattgagccttcgttctcaccttggaattctcctgtgtttgtaattcagaagaaatcaggcaaatggcatacgttaactgacttaagggctgtaaacgccgtaattcaacccatggggcctctccaacccgggttgccctctccggccatgatcccaaaagattggcctttaattataattgatctaaaggattgcttttttaccatccctctggcagagcaggattgtgaaaaatttgcctttactataccagccataaataataaagaaccagccaccaggtttcagtggaaagtgttacctcagggaatgcttaatagtccaactatttgtcagacttttgtaggtcgagctcttcaaccagtgagagaaaagttttcagactgttatattattcattatattgatgatattttatgtgctgcagaaacgaaagataaattaattgactgttatacatttctgcaagcagaggttgccaatgctggactggcaatagcatccgataagatccaaacctctactccttttcattatttagggatgcagatagaaaatagaaaaattaagccacaaaaaatagaaataagaaaagacacattaaaaacactaaatgattttcaaaaattactaggagatattaattggattcggccaactctaggcattcctacttatgccatgtcaaatttgttctctatcttaagaggagactcagacttaaatagtcaaagaatattaaccccagaggcaacaaaagaaattaaattagtggaagaaaaaattcagtcagcgcaaataaatagaatagatcccttagccccactccaacttttgatttttgccactgcacattctccaacaggcatcattattcaaaatactgatcttgtggagtggtcattccttcctcacagtacagttaagacttttacattgtacttggatcaaatagctacattaatcggtcagacaagattacgaataacaaaattatgtggaaatgacccagacaaaatagttgtccctttaaccaaggaacaagttagacaagcctttatcaattctggtgcatggcagattggtcttgctaattttgtgggacttattgataatcattacccaaaaacaaagatcttccagttcttaaaattgactacttggattctacctaaaattaccagacgtgaacctttagaaaatgctctaacagtatttactgatggttccagcaatggaaaagcagcttacacagggccgaaagaacgagtaatcaaaactccatatcaatcggctcaaagagacgagttggttgcagtcattacagtgttacaagattttgaccaacctatcaatattatatcagattctgcatatgtagtacaggctacaagggatgttgagacagctctaattaaatatagcatggatgatcagttaaaccagctattcaatttattacaacaaactgtaagaaaaagaaatttcccattttatattacttatattcgagcacacactaatttaccagggcctttgactaaagcaaatgaacaagctgacttactggtatcatctgcactcataaaagcacaagaacttcatgctttgactcatgtaaatgcagcaggattaaaaaacaaatttgatgtcacatggaaacaggcaaaagatattgtacaacattgcacccagtgtcaagtcttacacctgcccactcaagaggcaggagttaatcccagaggtctgtgtcctaatgcattatggcaaatggatgtcacgcatgtaccttcatttggaagattatcatatgttcatgtaacagttgatacttattcacatttcatatgggcaacttgccaaacaggagaaagtacttcccatgttaaaaaacatttattgtcttgttttgctgtaatgggagttccagaaaaaatcaaaactgacaatggaccaggatattgtagtaaagctttccaaaaattcttaagtcagtggaaaatttcacatacaacaggaattccttataattcccaaggacaggccatagttgaaagaactaatagaacactcaaaactcaattagttaaacaaaaagaagggggagacagtaaggagtgtaccactcctcagatgcaacttaatctagcactctatactttaaattttttaaacatttatagaaatcagactactacttctgcagaacaacatcttactggtaaaaagaacagcccacatgaaggaaaactaatttggtggaaagataataaaaataagacatgggaaatagggaaggtgataacgtgggggagaggttttgcttgtgtttcaccaggagaaaatcagcttcctgtttggttacccactagacatttgaagttctacaatgaacccatcggagatgcaaagaaaagggcctccacggagatggtaacaccagtcacatggatggataatcctatagaagtatatgttaatgatagtatatgggtacctggccccatagatgatcgctgccctgccaaacctgaggaagaagggatgatgataaatatttccattgggtatcgttatcctcctatttgcctagggagagcaccaggatgtttaatgcctgcagtccaaaattggttggtagaagtacctactgtcagtcccatcagtagattcacttatcacatggtaagcgggatgtcactcaggccacgggtaaattatttacaagacttttcttatcaaagatcattaaaatttagacctaaagggaaaccttgccccaaggaaattcccaaagaatcaaaaaatacagaagttttagtttgggaagaatgtgtggccaatagtgcggtgatattataaaacaatgaatttggaactattatagattgggcacctcgaggtcaattctaccacaattgctcaggacaaactcagtcgtgtccaagtgcacaagtgagtccagctgttgatagcgacttaacagaaagtttagacaaacataagcataaaaaattgcagtctttctacccttgggaatggggagaaaaaggaatctctaccccaagaccaaaaatagtaagtcctgtttctggtcctgaacatccagaattatggaggcttactgtggcctcacaccacattagaatttggtctggaaatcaaactttagaaacaagagattgtaagccattttatactgtcgacctaaattccagtctaacagttcctttacaaagttgcgtaaagcccccttatatgctagttgtaggaaatatagttattaaaccagactcccagactataacctgtgaaaattgtagattgcttacttgcattgattcaacttttaattggcaacaccgtattctgctggtgagagcaagagagggcgtgtggatccctgtgtccatggaccgaccgtgggaggcctcaccatccgtccatattttgactgaagtattaaaaggtgttttaaatagatccaaaagattcatttttactttaattgcagtgattatgggattaattgcagtcacagctacggctgctgtagcaggagttgcattgcactcttctgttcagtcagtaaactttgttaatgattggcaaaagaattctacaagattgtggaattcacaatctagtattgatcaaaaattggcaaatcaaattaatgatcttagacaaactgtcatttggatgggagacagactcatgagcttagaacatcgtttccagttacaatgtgactggaatacgtcagatttttgtattacaccccaaatttataatgagtctgagcatcactgggacatggttagacgccatctacagggaagagaagataatctcactttagacatttccaaattaaaagaacaaattttcgaagcatcaaaagcccatttaaatttggtgccaggaactgaggcaattgcaggagttgctgatggcctcgcaaatcttaaccctgtcacttgggttaagaccattggaagtacatcgattataaatctcatattaatccttgtgtgcctgttttgtctgttgttagtctgcaggtgtacccaacagctccgaagagacagcgaccatcgagaacgggccatgatgacgatggcggttttgtcgaaaagaaaagggggaaa

SEQ ID NO: 34 - DNA, 7953 bp, Homo sapiens
  repeat_region (1)..(7953): hervk11i
tctggcgcccacgtggtctttcttttttcctaagtgcatgtgggaacccgattccctttggtaggtgcggagaaacgtcatcggttcggtccacagaaacgcttgttcgactccccgacgactggtgagtagtctgtgtatggtccgggttaactatgggtcacgcggagtctaaacattatgcttatctctgctatattaaactcctgttaaaacagggcggggttcgagtgcccatggaaaatatggtcactctattcagggcggtggaaaaatactgtccttggtttcctgaaaaaggaaccttatatgtagaactatgggatcatgttggttcaacattccgggaactggtcccagcaggaaattatgttcccgtcactgtttggggtgattgggccttggtacgtgccgtcctaatgacataccaatcccgtgaccccctgcagttaccacagttttctgaatctggcgatcctccgcctcttcctcagctttcctctcccacacggccttcattatctgctcagcctctcccttcgcctactcctcccccacctaacgatactgaggattcaatgtctaactccggtgactttggcttaacgtcaccccctgatgatcttatttcttttcacgaagagctggtacttgtagctcccgcggccccgactcagacagcccgggaccatatatatgctaattcttccctcttcaaacctttgcagtctttgcctccggagccacctaatggctccaggaccaaactacaatttacctgtaattctgcaggccctcccccatccactgcagcccctcaccctcctgtcgtttcggttcctcaaccggtcactttgccatccactcaacctgcttctctgtacccttcttcacacatggataccagtaatcaccagtacgcttctgcctcttctgctcccccaatgcccctttctcacactctcataccggtccgacctcctcaacctcagtttcccttatctacacatacttttcctgtcacttctatgccgactccgtctcatgtgcctgctcttgaaacttccatgcaatgcttattacgccaaaacaaagaaacaagtggattagaggtgtgggcttatccggtcacgctggaacctcccaatgctcaaggggtacaaatgcgtcgatatgcgccgctcaatcttacctttttaaaagaatttaaggatgcttgtactcagtatggtcctacttctccttatgttaaaatggtattacaaactttttgtactgaggtcattttgcttcctttagactgggaccttttggcaaaagctgttctaactccatctcagcatttacaattccgtacctggtggtcagaggaggcccgtctgcaggctcagctaaatcggactaatggcattctaattactcaggctcagctcacaggctccgatagtttctctgatacttacgcccaattaggctttgatgctcttaccacggaacaagtaacaaaggtgtgtatgagagcttgggataaattacgcgccccaggccaagctcctgtttcttttactactgttaaacagggtcacaatgaattataccctgattttttggctaaattacaagatgctgttgaaaaatctgtctctgatgagcgcgctcaaggtattctccttcgtatgttagcttttgaaaatgcgaaccatgagtgtaaaatggccatgcgttccgtccaacgacaaaatttacctgatcacgaggtgttgcctgcatatattaaagcttgtgaaggcattggatcagagacccacaaagctattctgtgggcacgggccatgaaggacgccaatcaaactggctcgactaattcttttcttggagcctgctataattgtggtcaacttggtcatactcgaaaaaattgcactgttaaaaacttaaaagcggccaagccggctcaacaaacacggccaaatgctcctgctactgtttgcccacgttgtcgtaaaggtaaacattgggcaagtacttgccactctaagtctgatatagatggaaatcccttgccacagaaccagggaaacgggaagcggggccagtcccaggccccaatatcaaatgggacacctcagactcagaccaacgttgcgtttccgcttcaagcggtcccaacgcagcccccagcacaaacaaatttacctacagccaacccagatgggtcccagcctcttcttctgtctcagtacaatgcttgtctacctccacagtagggggcagggcggtcaatctctgtagtaccattcctctaaatttactacctaattctttgcctttaattgtccccacgggggccactggccctttacctcaaggttcggtgggcctggtgttaggcagggcatccacctctgctaaaggtatcatagttcatactggtctcattaattctgattcctctgatgagattaaaattatcgtgtctgccaaggttcctgtttccattccggccggtgagtcaattgctcaattgcttttactacctaatatcgttttaaacaaaggagataagacacgtggccctgggatgggctccggcggtgaaaaggccgcttattggattaatgtaatttctaaacaacggcccacctgcaccatacacattcaaggaaaaaagtttgagggcctagtagatactggggctgatgtttctattatttcctctactttacggccttcctcctggcttaaacatcccgccaacatgggactagtaggtgttggaaaagccgaggaagttcaccaaagcacatttatcttggcttgcactgggcctgatggtcaaaagggaacaattcagccttatatcatgcccatccccattaatcttcggggcagatatttgctggaacaatggggggctgaaattaatattccacataactcttatagtgctcccagtcagcatatgatggaaaacatggggtttgttcctggactcggtctcggtccaaagcatgaagggattactaaacccctcccaattactataaaagaagacagggctggtttaggttatcctttttagtggcggccgctgccacgcctcctgatcctatccctttacaatggaaatctgacacacccgtttggattcagcagtggccgctttctaaagaaaaactggaggctttaactcaattggtttctgaacagttacaacttggaaatgtggaaccttctctttccccctggaattctcctgtgtttctagtaaaaaagaaatcaggcaaatggcggatggtaaccaatttaagggccattaatgctgtaattaaacctatgggggccgtccaacccggcatgcctgcccctgctttaatacctaaaaattggcctctcatagttattgatcttaaagattgtttttttcatattgctttacataaatcggattgtgaaaaatttgcttttactgtaccatctatcaataatcaggagcctgcagctcgttatcaatggaaagtacttcctcagggaatgctaaatagccctacaatctgccagctttatgttggacaagtgctttcaccagttcgagcccaatttccccaggcctatattcttcattatattgatgatattttaattgctgcccccactgataaagaattaattgactgttatcaaattttgagccgctgtgttacagaggctggattacacattgctcaggataaaattcaacagaccactcctgttcaatatttaggaatggtggtcgataaacaacgtattcaacctcaaaaagttcaaattaggagagattctttgaaaactttaaatgacttccaaaaacttttgggtaacattaattatttaagacctactttaggcattccgaaatatgcgctgtctaacttgttttctacgctgcgtggagattccaatctccgcagtctcaggactttgacccctgaggcttcaccggaacgggaattcatggagggaagaatccagactgcccagttatctagagtacagccatttcagccttttcagcttctggtttttgcttcattgcactcccctactgggctaatagttcaacataatgatttagtggagtggtgttttcttcctcattctgtgtcaaaaactttgtctgtttatctggaccaactggccatcttaattggacaagctcggtgtaaaatacttgaaatttccggatttgatccaaatttaattgtagttcctttaaatcggctcaaaattcaagccacctttcaacattccgtactgtggcaaattcacttggctgattttattggcgttattgacaatcattatccaaaaaacaaattgtttaattttataaaaatgacatcttgggtggtccctcgattaaccaaagatcagcccattcctgaggccattacagtgttcactgatggctccagtaatggaaatgctggttatgtgggtcctacagacaagcttatttctaccccttatacctctgctcaaaaggcagagttaattgctgtaattactgccttacaggatttccccaaacctttaaatattgtctcagattccgcttatgttgtacatgccactaaaaatatagaaaccgctactatcaaacatattgataattctgaattggcttctttattttcaaggttacaacaggtggttcgccagcgtagacaacctttctatattgcacatattagatctcataccactttaccgggacccatgtctgccggtaaccataaagtcgactgtttggtctcttttgcaacccaagaagctcaggagttccataatctcactcatgtcaatgctgctggattaaaagataaatttgctcttacctggaaagaggctaagcttattgttcacagctgttctcagtgtcaagtttttgtacttccaaatcaggaacctggcgttaatcccagaggcctaactcctaatgatttatggcaaatggatgtgactcatgttagctcctttggcagactctcatatgtgcatgtttctgtagatactttctcaggttttatctgggctacttgccaaacaggggaaggcatggcccatgttaaaaaacatctgtattcttgctttgcagttatggggcttccacgtcaaatagagacagacaacgcctctggatatgttagtaaggcttttgacttatttatgcaacaatggagaatttcccttattaccagaatcctttatgatcctcatggacagactgtggtggagtgggcaaatggcactttaaaaactcaattggaactacaggtgtgtccaacaaagcataatttaactactccccactcccaattacatttggcattgtttactttaaattttttaaatgttcctaaaaataatactctaactgcagccaaacgccattatacaggcaaaaaattctccctaaacgaaggcaagccagtgttatggaaaaactcccaaaccaatacctgggaacctggaacaattataacgtggggaagaggatatgcttgtgtttcaccaggagatcatcaatcccctgtctgggtgcccactagaagacttaagcttcgtgtgaatactgacaatgaaaaccacagggaaaagacgtccgtgtcagagaccgccctcagacgtggtgagatctgtgccaactcctcagaagctggcacgccaaatcaaaatgggtctgattcaatcctccctgatggcaacggagacccatctaactaatcccacttctcctaattacctttctttttctccttacaaacctaaaaatctcaccatttctattagcctgaaaataacatccctctgttcttctcttcctccttcagcactgaatctcgcttacaataggttttatttaatgattctcctccttatactttctgtctcaccagtttcctctcacactgatttacctgctacacaaaattattcttattgggcttatgtgccttttcctccacttattcgacctctcacctggatggatgctcctgcagaaatctacactaacgatagtgtgtggatgcctggagctacagatgaccattgccctgctcaaccaggagaagaaggcactgcatttaatgttactatgggttataaataccctcctctgtgcctcggacatgcacctggttgtatccatctagaaactcaagtctgggctgcttatcttccggagagatcagctacagagaaatggggacatttggtctccggcctctccctttctcctttaagacaaatgaaagggggagtaataggagataccccatactttcaatataaacctgtaggaaaaccatgccctaaaaattttgagggcccatctaaaactttaatttgggaagattgtgttaactcacatgcagtaatattaaaaaatgactcatatggtttagtaatagactgggcaccaaagggctatttaaaaaacagttgctcctctggcggaaaggaatgcctggaggctacttattttatttcttattgggaggacgaggatcatcatcctactttgcataggaggttcagctcgttctttcccttaaaatgggaagataagggcattaccccccgccacccgaggcctcgtatgatattccccattctgagcccagaacacccagaactttggaaattggctattgccatgtctggactgcgagtatgggaaggggaaacttttctgtctgttgtccccactaccgcccctcacatccgtgattctgaaccccatgataaatcccctttgaacctttttcctctttttgatgccgatcctcctttatgggactccgattggcattacgataattcttatcgacccaggtatgcccctctacctcttcagcatccccaggcacctcggattgcttctttacggtggagaacattgggcattgccaccgccgctcctctccctcagtatcaacgtagattcagacattctgctttgtttacctccaacctgactattcctatacagagttgtgttaagcctccttacatgctgttagtgggaaatatcaaaatttggacgaacaatcaaactgtccaatgcattaattgtcatttatacacttgtattaactcccgttttgactccaggaaaagtgtaatgttggttcgagctcgagaaggaatctggattccggtaactttgcccagaccttgggaatcctccccctcaatacatttaattaatgaagtgttacagcgaattctaaaaagatctaagagatttgttttcactttaatcgctgtgatcatgggcctaattacagtcactgcactggccaccactgccggaatggcattacatcaatctattcaaacggctcattttgttaatgattggcaagccaattccacccaaatgtggaattctcaacaaggcattgatcaaaaattggctaatcaaattaatgatttaagacagtctgttatttggcttggagatcgggtagtgagtctcgaacatcgcatgcaaatgcagtgcgattggaatacttcggatttctgtatcaccccatattcctataacgagactgatcattcatgggaaatggtcaaaggacaccttctgggtagggaagataatttatcattggacataactaaattaaagaaacaaatttttgaagcctctcaagctcacttatccattgtgcctggagctgaggcgttagatcaggtggcagaaaatctttctggactaaaccccacgacttggattaagtctattgggggctccactgtagtaaattttggaattatgtttctctgtttaatcggcttgtttttagtgtgccggaccagtcaaagaatcctgcgtcaaaatcgagagaacgaacaagccttcatcgccatggcacatttatataaaaagaaagggagaga

SEQ ID NO: 35 - DNA, 8116 bp, Homo sapiens
  repeat_region (1)..(8116): hervk13i
tctggtgcccaacgtgggtttctccctcactgtgtgaagttgcactttgagtgcaggactcagcagaggacttttcaacgacagattcctgaggattgtcgtcattaagcttggtggtaagcttgggcactcagagtatctcagggactccatgggacaagccagtacaaagtacttggcctatttaaacacttcataaaaacccttcttaaagaaggagaaatttcagtttcttctgacaagctaattgaactctttgaggtcgtcattctcatttgcccttggtttccaactgagggaactctagaacttaaaagattgggatgaggtgggccaacagtttaaaatcgctcatagaggggaacatgttatcccgccggccatttgcacagtttggtcctcggttcgctccatcttagaatccttgcagccataggaggagggaatggagggtactctacctttgctctcctccgaagaggttgaggaaatcctcagtactctctctccagagggcactgcacaacctgaagccatcattttagaaatggacctccattctgatattcctttggcatcaccaaatacaccacagcctacctgtcctaccgcacccccagtatcgctttatgaggaccttatgaaggatctccttccccagatctaagaaatccctctgaaatgtactatcagcagcccttgtgccggaacctcctgtactgtctcagccctgctgtagggctctcaaccatccatctgttcagcccggttatgaggctgtcaactctatccctgttcggcccagtaatgaggccctcaatgctatctcttcacccaattctgcctttcctcttatgcatcaggctccacagaagcctaacctgcagtccatgcaccagcctggagttcaggccctgcagtccatgcaccagcctggagctcaggccctgcagtcaatgcaacagcctggagttcaggcccctgaaagatcgcaaagcaggcaactgtgcgtcagcctggcttgaagtctctcaacttctatattcaaaaccccaatttcttttctgcttctggtccagtcacaactgctgttgctacccataagcaataggttacatacattcctgataatgacacccctcttatgagggccattctcagggcaagggaatacggggatcccgaggcatggtgtcctgttattctacaatctcctatacctgctgcccccattctagctgcccctgctctggctgcaatggatcagccaccacctgctgaccaagttcagcaggcagctgacgccactgcctctccagacccgcagctcaggggatcaggctcctcagccagtgcaagaagggcctgatgtcccagcagagccagttcctgaaataccttccattcgggctgtggtgcaacctgatcctttacaccctggtcaggtccacctatgacctgctacttgggaaagtttttctttcaaattccttaaagatttcaaagagtcggttaaacaatattggtaccaattcccctttcgtccgttccgcccgaaaatccttagcagaagataaatgcttggtgccttgtgactgggaaattctagcaaaatctgtcttatctaaatcacaatatttacaatttaggacatggtgggttgatgctgtccaggattgagtccgccttaatcagggctctaatcctcctgttaacgttacaactgaccagttactgggaatggggcagtgggctgcaattagaaagcaaactatattgaatgatgaagtcactaagcaactccgaaaatgctgcctgggtgcttgggataagattcaggatgatggcactagatgtccctcctttacagccattagacaaatgcaaaatgaaccatacccctgacttcattgcccatcttcaggacgtggcagaaaaatctattcctgatctaaataaccaacatttggttgtggaactcatggcttatgaacaagcaaatccagattatcaggctgctattcactctgtaaaaggtaaaatcccaccaggaagtgatttaatcacaacctatattaaagcatgtgagggtgttggtggaacgttacatactgctatggtcacggctcaggctatggccagcattagaatgcttggacaatttcctggtaattttcactgcagccaatctggacataccaggaaaaaatgtcctcggtgttcagaccaccaccctgtacaacaccaatcccaaaaggccgtacaactgcgagtcccaccatccacaccatgcccaagatgccataagggcaatcactggacagctcactgccactcgaaattcgacactaatggcaaccctttacagccacttcaaaaccagggaaatggtaagaggggccagcccaggcccctccagacaatgaggcattccccaactcccagccttgccttgcagccagatgagggcatccccagctcaaccaatcgatccaaccactcagtttccacttcaaccattcatgccacaagcatagatgtcacaaccccaacaaggatctcatttcaatgctcgtcccccgccaccacaggatctgcagcagtagatctctgctgtattagagacatttccctttttgcctggagagccaccaatagctgttccacaggtgcttttggcccttgccacctggctctgttggtttattgctcagtcactcaagcttaaatttaaaaggtgttcaggtacataatggtgtaattgactctgattactctggggaaatacacattactgttagttctgcagttccttgccaagcttcagcaggagattgaattgctcaacttcttcttctgctgtacattccactcagatccagttctcataaaagaactggaggttttaggagtgcagataatcagggtaaagtggcttactgggctaataaaatttctgacacctgacctgtttgttccacgcatatacacagaaagaaattcatgggcatgattgacctgggtgctgatgtttccattattgctttacaccaatggcctcgtcactggcccaaagaagtcacattcaccgggttggtgggagttggtcaggccacagaggtttatgaaagttccactattttacattgtactggcccagaggacgaactggtactgttcaccctctacacctattccagttaatctctggggaagagatcttttacagcaatggggtgcacaaatttcatttccacatgctgccaacagtgagcaaagtaaaaacattatgacaaaaatgagatatgttcaagacactggtctgggaaaattggctccaggtattactgcctattcaacctttctataaatttgactccaaagggcttggttattctttttagaagcagtcactgtcaagcctccagatgccatccctttgacttgaaaactcagccagtttgggtggatcagtggccgctcccaaaaaataagctggaggcgctccataatttagtcctggaacagttagaattgggacacattgaggaatctttctctccatggaattcacttgtctttgttatccaaaagaaatctggggaaaacagagaatgctcactcatcttagggcagttaatgctgtacttcaacctctggggacattacaatctggcttaccctcccgctctatgctcgctgagtattggcctctaatcctcatagatcttaaagattgcttttttaacattccactggcctctcaggactttgaaaagtttgcttttatggtcccttccctcaacaatgtcgctcaggctacatgctactattggaaagtcctaccacaaggcatgcttaatagtcccactatttgtcagtattttgtggggcgtgtgcttcaacctgtcagggatcagtttccccgatgttacatcgttcactacatggatgatctcctctgcacagcccccccatacaccattttgatttcctgcttttctgtgattcaacaagccatttcagaagcaggtttgactattgcaccagaaaaaattcaaactacctctcattttcaatatttgggcatgcagttggaagacaagctgattacaccacaaaaagttcagcttaggagagacgccttaaaaactttaaatgactttcaaaagttacttggggatattaattggatttgcccttctttgggcatccctacatatgctatgtcaaacctttttgccacattatgtggggatccagatttacacagcaaaaggtttcttacagaaacctcagactcagagaggctgagtctgagttatgattgattgaacaaacagttcaatggtctcaggtcactagattcaatcccaaattaccttttactattttaatttttcccactgaacactctccaacagggatcatcacttaggaacatgatataattgaatggtgttttcttccccatagctctctaaggacacttactatttaccttgactaaatttctaccctcattaggcaagcctgttcccatcttttatgacttttgggacaggaatctcaaaaaattattcttcccttaaaccgtcaacaactctgacaagcatttacaaattgtgttatttggcaggtaaatttggcccatttccctggtataattgacaatcattaccctaatgtaaaattgttccagttcctgaaactcacttcctggattttacctaatattaccagaagtattccattaactggagccgttactatatttactgatgcttcctctaatggccgtgctgtatacacaggaccatgggaacgcgttcttaacacaggacctatttctgtacagcgagctgaacttagcactgttatgactgtccttgaggattttcctgagtctgtcaacattgtttctgattctgcatacctcgtgcatgttgcccacaacatagaaacggtgttaaatttttgcctgatgaaagtttactttcactttttcaaaagtcttagacagttctcagaaaacactgtgcccccttttacattactcatatttgagcccatacatcacttccaggacctctttcagctgtaaatgccagagctgatgctttagccacatccatttttatggacatgcgaaattgtcgtgccctaactcatgtcaatgctgcaggactcagaagcaagttccctcccacatggaaacaggcaaaaaccatagtacggcactgtccctctggccaagagttaattttacaaccacttccttcggcagttaatcctacaaccacttccttccagagttaatcctacaccacttccttccggagttaatcctacaaccaattccttcaggagttaatcctacaaccacttccttccagagttaatcctagaggcttttcccccaacacactctggcaaatggacgtgacccactttccagcttttgggagactttctttcatacatgtaacacttgacaccttttcccatttcatctgggttacatgccaaacaggagaaagtactgctcgtgttaaatgacatatgccttcttgtttctcagttatgggctgccctgctaagcttaaaactgataacggtcccagctataccagcattgcctttaaaaagttcactcaagcatggggcattactcacactactggaattccctataattctcaaggacagcctctggtggaatgagctaataaacctctcaaggaccagcttcgcaaacaaggtaacaaaaagaaaggggatgtcagtactccccatgctcagataaatttagctctgttcacattaaaatttttaaatttggccaagaaccaacctttcatggcagcagaacaacactttgctggtaataaatttgacccacaaaaaggcaagcaagtatggtggaaggacacaaaaactaataaatgggaattacgcactgtaattaacatggagtaggggttttgcttgtgtctccccaggaaaggaccaacaacctgtttgggttctctccccatcagctgaatttgtaccatgactccagccctgaagaaccatcagaaacaaaaggagaagagccgccagaaatcaaaacgcaaggctcgtcacctgactaatacaatttatatctcaagtttgcctcacagcctcgccctataactcccaatgctaaaattccaccctgctgatgtgggggggtcagataaaagtaatgtccgaagaggttgagagacacctacaggacaaagggattccaaaaactatgggtaatgttatcttggctgcctttatggtagttactgcagtggtaagtatacccggggctgcagcaactcaaaattacacctactggcatatgtcccgtttccattcttattcgatctgtttcatggatggattcctcagtggaagtttatactaatgacagtgcattcatgccagtccctaatgatgacagatttccggcttaaacagatgaagaaggaatgccttttaatgtgtccattggatataaatttccaccattgtgtgtaggatttgcacctggttgtttggcattctctaatcaaaattggatgtggactgtaccggcctccagcaatgattcttatcaggtgcataatgtcttctgtagtaattcttttcaggttctgaccgttaacataaattcatttgaagaacagagaattcctgtcacagtaaagcataataaaacacaaggattgccagactgtttaaaagaccttataaagggacctaataattcaaaacattctatggagtgattgcaatgccccaaaagtagtagtgctaagaagtccgatcacaagtgttgtcattgactgggccccaaaaggatattattggcgagattgctctggccaaaatacccaatgtcctgagtttaactatttaatagattatgaagagaaaggctggcagtcctacaaaaagagggaatgggtgtctccttacccattcaaatggttggacaaggtcatcgttcctcctagaccaaaaatgattcatcctatagttaccccggaacatcctgaattgtggaggttgtctgcagccatatccggaatcagattatggaatgttgcttatcaaaaaattcttacaaataccaaaacaaacatgtataagatctctttaatgtctgagagggtggtacccattaggagctgtgttaaaccaccatatgttattgattggaaacataattatcacccctgatagtcaaactattgaatgcaataattgcaaattgtttacatgcattgatgctacatttgatccaaaaacaagtgttctcctggtcacggccaggaaaggggtatggatatcagtttctttacaccgcctctgggaatcgtctcttctgttcatgtagtcaataaagtccttaaaggattcttaaaagaactaggagattcatttttactctcattgcggtgattgcaggtttaattgctgttactacaacagcggctactgctggagtagccattcataacttggtccacaccactcattatgtggaaacatgccaaaaaaattccacctgactttggaattctcaggctcagactgatcaaaaactggccaatcaaattaatgatctccaccagagtgtcatctggttgggagacaggatgatgaatttagaacactgaatgcaactacaatgtgattggaatacttctgattattgcataacaccttatggttacaaggaagatcaacatagttgggaaaaagtccaaaggcatctaaaagcctgggatgataatttaaccctagacatttcaacactgaaggagcacatttttgaggcttcccaggctcacttaactaccattcctggttctgatatatttgaaagaattacaaaaggactatctgatctaaatcctttcaagtggatcaaacccgttggaggttcacttttgttatcagcattactaatattggtgtgtttatgttgtttgcttttagtctgcaggcgtctccacggagtccaatgaaaaactcgaagccagcgacaagcaatgatggcaatgataatcctaatcaataaaaaggggggaga

SEQ ID NO: 36 - DNA, 5945 bp, Homo sapiens
  repeat_region (1)..(5945): hervk14i
ttcctggctgcccaacgtggggcgacaaagaccccagtgaaggaacgctagagcatgtgaaagcagaggacgcatcgtcaaaggacacccgaggacgtctaaaagaagctcggtgggaaagctgagcgctcggaagaaccagggtaacaatgggacaaagtgaaagcagacattctgcttatttaaatttcttaaggcatttattacgaagagggggagtgaaagttagtactcagaatttgttatcactctttagtgcagtaaagcagttttgcccatggttcccggaacaagggactatggagttggatgaatgggagagaattggcagagattttaaaaaggcgtataaagatggagcaaaaattccagtctcggtttggtcaatgtgggtgctaataaaagcagctcttgagccatttcaaacagatgatgaggcagattcagatgaggaagaggaggacgagtgtaaaaaactaacttcagattctgaatgtgaggaacaggaaacggaggaaattaaagaaaagaaagggaaactgaaaaaagtatgttttactagcccgtcggctccacctgctgaattaagtgaatggccacctcctctctctccccttaatgggcgagaaaatgaattagctacaaaacttactgctcctgtagttgcaacattaaaacctggagcaattggtggtgctatacaaaattctattcaaaaggctagagccgagggagaccttgaagcatggcaatttcccgttactataatccagcagggaggacagaatatagctaattgggccacttttccttttaaattgttaaaggaattcaagcaagccattagtcaatatgggccgaactctccttttgtgcaaactttattaaaaaatatggctcttgataatagattaataccatatgattgggatactttgacaaaatctgttctcactccatctcagtacttgcagtttaaaacctggtgggctgatgaagctcaaactcaggcaagggaaaacacacaagcacagccacctgtgcctgtttcctttgaacagttaatgggagttggccctaattggggtcgattagaaaatcaagcagtaatggaggatgttgccattgttcagctgtgctctgtgtgcttacgggcatgggaaaggataaatgttacaggggaaaaatacccttctttcagttctgtccgacaaggacctaaagaaccatatattgattttattgcttggctccaagaggctgtgtataaagccataactgataaaacagctcaggatgttgtaatacagcttcttgcatacgataatgctaatgcagagtgtcaaactgctattagacccctgagagggaaggctcatttagctgaatatattaaggcttgcgatggcattggaggtaacttacataaggctactcttttagctcaggctatggctggattaagagtaggaaagaatatgccccatttctcaggctcttgcttcaattgtgggcaatttggacacacaagaaaggaatgtagaaaaggaaatcaaaaggcaagaactactaccatcaatcaacagaaaagtcccggtgtatgtccccggtgtaagaaaggcaatcactgggcaagtcagtgtcattctaaatttagcaaagatggacaacctctttcgggaaacaggaagaggggcccgcctcgagcccctcaacaaaccgaggcatatccggcacagccagtgcccttacaaatgtacaacaattgtcccccgcctcagcaggcagtgctgccatagacctctgcagcacaattcccgtctccttacttcctggggagccaccaaagaaggtccccacgggagttaggggacccttaccctcaggaacagttggtctattacttggaaggtctagtctaaatttaaaaggtgttactgtgcatacgggaataattgactctgattataccggagaaattcaattagttattagttcctcgactccgtggtctgcctccccaggagaaagaattgctcagttgttgctgttaccttacataaaactaggaagcagcacagtgaaaagaacaggaggctttggtagtactaatccagcaggaaaggctgtgtattgggttaatcaagtgtctgacaaaagacctatttgcacagtaactattcagggaaaagattttgaaggactagtagatactggagctgatgtctctattattgctataaatcaatggccccggcactggcctaagcaaaaggcatccattggtattgttggagtaggagctgcctcagaagtttttcaaagttccttgattttaccatgtcaagggccggatggtcaggaagggacaattcagcctatcattacacctattcctgtcaatttatggggtagagacttattgcaacaatgggatgctgaaatatctattcctatggatcaatatagtaataatagtagacaaatgatgaaaaatatgggatattgcctgggaaaaggactaggaaaagataaaaatggccaatcagaacctttagaattaaaagggcaaacagatcggacccgattggggtgtcatttttaggagcggccattgttgagcctccggctcccattcctcttgtttggctaactgccaaaccggtttgggtggagcaatggccactgaaacaggaaaaactggaggctttaaaagaactggtgcaggaacaattgcaaaagggacatacagagcctactttctccccttggaattctcctgtatttgtcattaagaaaaaatcagggaaatggagaatgttaacagatttaagggctgttaatgctgtgattcaacccatgggtgcactacaaccagggctgccctccccaacaatgatcccaaaatactggcctctcatagtaatagatctaaaggattgctttttttaccattcctttagctgcccaagattatgaaaaatttgcttttactgttcccgccataaataataaagaaccagcggacagataccattggaaagtactgccacaaggcatgctaaatagcccgactatttgtcaaacttatgtcgggaaagctattaagccagttagagaacagtttaaaaaatgttatattatccattacatggatgatattttgtgtgcagctgaaactagggaagaattgatgttgtgctacaaacagttagaaaaggctgtaaatgcggcagggttaattatagcccccgataaaatccaaacttctactccctttcaatatctaggaatgaaggtagagcaaagtgctattaagcctcaaaaggttcaaattcgaagagataatttaaaaaccttaaatgattttcaaaaattattaggagacattaattggattcatccaactttaggcattcctacctatgctatgtctcacctcttttctactttatgaggtgattctaaccttaacagtaaacgctccctgtccaaagaagcattggaggaacttcaattaattgaggaaaaaattcagcaagcacaagtagaacgaattaatctgatacagccattacagtttttagtttttcctactaagcattcgcctacaggagttatagttcaacaggatgatctggttgagtggctttttctacctcacaatacaaccaaaatgctcactctgtacttagatcaaattgctgtgctagtaggacaagcgaggctgcgcacaacaaagctaatgggatatgatccaaatcagattatagttccattaactaaacaacaaattcaacaagcctatattaattcccaagaatggcaagttaatttggccggttttgttggcattcttgataatcattatcctaagtctaaaatcttccagtttctaaaattaacatcctggatattgccttctattactcaaaaagcccctattgaaggggccattactgtttttactgatggatctagtaatggaaaagcctcatttgcaggacctcaacaacaagttttgcaaactgactttgcttctgctcaaagggctgaacttatggctgtgataacagtgttaaaaacttttaaacagccagtaaacattgtttccgattcagcctatgtagtgcaagccacgcaaaatattgaatgtgccttaattcaaaatgtgactgatgaacaacttaatcttttatttcattctttacagcaagcggtacaacaaaggcattcacctttctatatcactcatatgagagcacatactaacctccctggccctttaactaaacttaatcaaagggcggatgcattggtgtctgcagtctttgctgatgcacaaacatttcattctttaacccatcttaatgccgcaggccttagaaaaagatatggtctatcatggaaacaagctaaagaaattgtgcaacactgttctgcctgccaagtcctgcatctgccacatcaaggaacaggagttaaccctagaggtttatctccaaattccatctggcagatggatgtaacacatattcctgcttttggaaaattgtcctttgttcatgtttcagtagatacctattcacattttatctgggccacatgtcaaacaggggaggctacagctcatgttaaaagacatcttttatcttgcttttctgttatgggaatcccagaaaaaatcaaaactgataacggcccaggatactgtagtaaagccatggctacattttttcaacaatggaatattacccatactacgggtattccatataactcacaaggacaggcaatagtggaaagagctaatcgtactttaaaaactcaaatacaaaagcaaaagggaggagaccaggaatataagacaccgcatatgcaattgcatctagctttattaacattaaattttttaaatttacaaaaagatcaacccatgactgcagctgaacaacacctgacaggacaaaaggaaaataaaaaggctggacaagatatatggtggagggatgcacatacaaagagctgggaaaaaggaaagataattttatggggaagaggatttgcttgtgtctctccaggtgacaatcaggtgcctgtgtgggtgcccaccaaacatctgaagatctatcatgagccacagcatctagtggacccacctgtacagtgcaaattgaaggtttgaggattgcttttaagcctcgatttgctttctctgtgccttctgttagaaggggcctgtttctcattatcagtggtaagttttaccccgtggtaattaaccaaagaggcagaagctgagttacaaatgcttcagcaatggcatgcctcccggctacagccacaaaagtttttgcttctgtttcagtagatttactaacgtgggggtgagggtatgcttgtgtttttgcaggagatgaacaaaccatgtgggtgccctcaagatgtgtacgaccatggaatgggagactggagggacccatggatcccaaccatggactgggttcccccagtacgagccatgagccagttgaatctgaatgcgaagatggaacgaggaccgaccagagtcttaccgatgcttaacggaccaatgctttctgactgagctcctctctaccctgaatacaagagaccctaatagttaggcaggagtatcatcgcccctattcagcatgaagaagttacagaagatggaccttcatccttctgcaacccctaggattaagggtcctcttgtaaaagggaaaggggagatatgtgggaagcattcaaaccagagcgactccatttttaataagggctaagaaaaatgaagctggatcaccaaccggcaattaagggctgcacagcctgcaattgccttgctcaattaatttaaaaagaggccaccttatgctagtaataatgatagcttctcttttacaaaaaagagaaggggggca

SEQ ID NO: 37 - DNA, 6837 bp, Homo sapiens
  repeat_region (1)..(6837): hervk22i
ggtggtgccccgcgtgaggaacgctgcaaacggatcgtgacggacccctcgaaaatgaaggtgaaaagaactgcgcagtcagtgagtaatcagtaagtcattggtgcccgctcgggatttccaagttcggggggaattgttcaggctagggtttcatcatgggacaacagttatcagctcaacagaaacagtatataaaagtattgaaacagctgcttaaagctagcggagcctcagtttcgcaggctcaattaagggacctaatgcaaactgttgtttcccataacccatggttcccggaagaaggtacgctagacgtagagctctgggaacaagtggggagaaatcttaaacaacatcatgcacaagggcaacgggtcccagtaacatctttaacgttatgggccttagttagggcggctttggtcccgttatacacagaagagcctaaaaagggaagggaggaggaaccgtcacctaccttaccacctcctcgtccctcagccccgctatcaccgggccaaaataacaaagaggaaacggaggttttgcctgagccccctcctccaatagattggaaaaaagacaggggatacgctacagctatgggaccctgtcttaagcaagcggcattagaaggggagctcttagcctgcccggtaatgcaagatcgacaaggcaatcaggtgtatgaacccatttcttttaacgcttataaagagctaagaaaaagcattaaagaaaacggagccgctagcccatttatgaaaggaatgattgaagccatggcagacaacttctgtatgaccccatgggactggtcagtgctagctaaaacaactttggagcccagccaatacctcctctggaaggcagaatatgatgagttgtgtgaacaacaagccaaccagaatcaggtggccaggcaagacataacagctgctatgctccaggggaggggtccccatgccgatgtacaacaactagattttgatccccaggcctatgcacaagtgtctttgtgtgctctcagggcttgggaccgaattcccgaaagcggagttcaacagggatcttttataaatgttcaacaagggcctcaggagccatttgttgaatttatcaatcagttaacccaggcaattaagagacaaattagtcacgcccaggccgctgatatcttattgttgcaattggcttatgaaaatgctaatgtcgatcgccagcaagcaatgcaggcaatcagaggaaaggcagccacagtcggggaacttatacgagcatgtcaactggtggggactgaaacacacaaagccaaaatattggctatggcattaaggcctcctaaagtgaaaagggagagaaacccaaattgttttctatgtggagagccaggtcatatgaagagggaatgccccaataatagagaccaaggtaactcaggaaaagaacccccttctatatgcccccaatgtaaaaaggrgaaacattgggcaaatcaatgcaggtccaaatttgayaaaaacagmaaccccataagtaaccaggcgggaaacttcatgakgggctggccyyaggccccgctwmaarctggggcaatgccagcagctttcctcggtcagatggaaagcccacagtcctctctctcagagcagccaccactgggagcgcaggactggacttactctgccccaacaaattagtgctaaaagaaggagaagaccctaaaagggttgcaaccgggatctggggcccactgcctccgggaacagtgggattagtcctagggcgatcaagcctatccagtaaaggaattaatgtgctcactggggtaattgatagtgattatcaaggtgagatattagttatgatggaatgtaaaggtctgcatattcttccccctggatcaaagatagctcagttactgctyttaccatactgggtccccaacgcccacggaaaggaaaggggaaagggaagttttggaagcacgggagccacaggagtatatgggaaycaattaatcactgatcagagacccatgattaccttaaaaattggaaataaaaattttactggcttattggacacaggggtggatatttcaatcattagtgatcaaaactggccagaaacttggccttgggtcactcagaaacaaaaaattgtcagcatcggggaagcgcacacagccaagcagagcacgcgccccctaacatgttgcgattcggagggaagaaaggcagttatacaacctctaatcatgcccatccctgttaatctttggggacgggacctattagcccaatgtggggggtcactctgcagacccctttctaataatggccactgttattattcctcccctacccctgacgtggctctctcaagatccaatttgggtagaacagtggcctttaaagggagagaaattacaaagagcccatgaattagttgaagagcaattaaaagccgggcatatagaaccatcaaacagtccttggaattcgcccattttcatcattcccaaaaagtctggtaaatggagacttttgcatgacttacgtgctattaatgctaatttgcaacctatggggccccttcaacaggggctcccttcccccgcggcgattcctcaagattggcctataatcgttattgacttaaaagactgcttttatactattccccttgcagaacaggacagagaaaaatttgcgtttacaataccagctatcaataatgaaaggccagcttgctgatttcattggaaagtgcttcctcaaggaatgctaaacagtcctaccatgtgtcagtatcatgtaaatcaagctttgctccccagtagaaaagaatttcctaattgcaagattattcattttatggatgatattttacyagcagccccaacggagccagtacttttaartttatatacctctgtcgtaaagaatacacagytaagaggtttaatcatagcacctgaaaaagtacaaatgtcctctccttggaaatatcttgggtacatactaacttcccggtcagtaagacctcaaaaggttaaattaaatactagcaacttacacaccttaaatgattatcagaaattactaggcgatattaactggctttgccccaccttgggcataactacttataagttgcaaaacctgttttctatcttaaagggcaatacagccctagactctcccaggtatttaactcctgcagcaaaaagggaaattgaggaaatagagcaagctatttctcagaggcaactagatcgcatagacccatgatattcagttcagttgtttgtttttcccactaaacattccccaacaggattaataggacagatggccccagggctgcgctttctagaatggatttttttgctcacataccgggactaaaacactctctccctatatccagctaattagtaaagtcatctattcaggccacagacgatgcaatcagttgctaggttatgaccctgatatcatcagaattcctttaagtaaaaagcaattcgaagcagtattgcccttatctttagatctgcaaatagcactctctgattacgcaggccatatagagcatgcccttcctgctgacaaactacttcagttcttatctcatactcctgtggttttgcctacaaaaatagttcactcccccatacctaacgctttaacactgtttactgatggctctggtaaacatggaaaagcggctatttggtggagaccacataattccctcactcattctggatttactagcactcagagagctgaggttggagccttaatattggccctggagactttttctgctcagcccatcaatattgttagtgactctgcttactctgtttatttattgcagaaccttgaaacagccctcattaagtccactctggagcccaccctgtgtgcactttttctttgacttcagcaattgctggatcaacgtacacatcctatttttatcacacatattcgagcccacagctcactgcctggcccactggcttatggcaatgatcaagcagacctgcaggttatgacgtcactgcttgaccaagccacccaatcgcatcaatttttccaccaaaattggagaaacttatctaaacaatttcaacttacccaragactagctaaacaaattatcctgcaatgcccagattgccagctcacaggcacgtcccctccttcaacaggtgttaaccctagaggactagaacctaatcagttatggcaaacagatgttacacacgtccctgaatttggaaaactaagatatgtacatgtatccattgataccaattctcatctaattagcgcacatgctcttcctggagagtccacccgatatgtcattaaacatcttcttttaacttttgcatttatggggcggcccacaaaaattaaaactgataatggtctggcttatgccagctcacaatttcaacaattttgtcacacatggaacatccaacattccacaggcatcccgtataacccccaaggacaggccatagtagaacgtgcccattccacccttaaaaatatgctcagaaaacaaaaaagggggaatatgagtaaggaccctgcaacactattggcacaagccttatttacccttaattttttaaatttaaatgataaatttcaatcagctatagaaaagcactttgctaaaacctctcaagacataaaacctgcagttttatggaaagatgtaaacagtaatgtatggtgtggtccaaatgaattgttaacatggggaagaggatatgcttgtgttcacaccccctcaggtcctctttggattccagcacgacgcatcaaaccataccatggcatggctaggacccaacccagtaccagaaatgaagaaaatgaccctgcaggacccacagccccggacgatgcagcttcctcggatgacacaagccccggacattacctgggggatgctgaagaagacaactcaggaggccgagcgaatcctgctccagacacagacaccattcactccagataatttgttccttgctatgctctctgttgtacattgcaactcatgtagggcattgatcctttttatgctctcgctttgtctgcaacctgtacctgctacactctattgggctcatctcttagatccgcctttcttccgccctgttacctgggcagacactcccttcccagcctctaataacgtaactgcttggctaggagggatagatttacccccagtggggtccctcagtaatggcacacattggactaaggtgccaggtaacactacatatcactccactatcctcccactgtgtgtaagttataaaggttctaacccttactgtgtacctgcccaaacacaattatggctacatcatggcaaaggaaatgcctttacagtcttagctgcaggtagcctcaaaccaggcaatgcaatcaatgccactttcccaaacattccttcctgtgctaaagaacaaagctgggaaagtaatggattccactttagctgggaggtctgtcacgggggacaagcccgtagcctccagttaggcaattataacatcttagactggagtccccacggccatttgcagggcaatcttactgatgtcctcatctatcatggcatcaatcacagtttcgtagccacgtcccgttcccctatratttgggccgatggggggatgggatatcccagaccccaagtaaagtccatgccaccccaagacactttatggtgcctgggacatcttagcacctcccttaacacctggcatgggacatatcataattccagtcacaattatactatgacctttattcataatcacactgatcagtgcctgatttgcactacccatccatatgttttccttatgggaaccgatatttccgttacaccccaaaactccacgtttgtgacccgggtgcagggacaggcttggttcgcctcatgtatcactaattataatatatctaatttaaatattactagtgtcatggtattgaggagacaatctgaggctttcctaccagtcaatttaacatgcgattggcaaggttcctctgcccttgccaccttagaatgtgccctgtcccaggtcagacgcaaaagattcatagttacacttacagcctttatagtctcagccatagtcatcctagcaactgctagtgttgctgtagcatctattactgaatcagtacaaacagctacttttgtagataatttggccagaaatgtgtctaatgaacttctcttacagcagggtayagatcaaaagattcttgcacgtctgcaagccctcgaggctgccttggaatatgtaggggagcgacaagatgcactggcattccaacagcaattaaactgtgactgggagcataagcacatctgtgtcacctctctaccttggaatcaatcaatacatagttgggatgaggtgaaacaacacctctggggaacctttcatgacaatttaacagcagacgtaaagcaacttaaaactaaaattctagaatccctaaacgccatagatctacacgcccaacaaacagccatatggaagggtgtgcgagatcatctctcctggatagacccccgctcctgggggtcactccttgattggaaaagaatgttgctaattatactcatgtttgtcttatgttatttactaattctaggatgcaaagccggaatacgagctataaccgccgcgcctgacagacctgttgctgcacacatctgtactcttcaatcaacaaaacctgatgcaaaaaacagaaaagggggaga

SEQ ID NO: 38 - DNA, 7242 bp, Homo sapiens
  repeat_region (1)..(7242): hervk3i
tagtggcgccccgaacagcgacagaatcaggcgctcaacaagtggcatccgaacacagggactttgaggacgtgaacgaagaaggtctgctggagcagagaaactgaaattgacaagacgaatggggaccctgggatgagtctgctggcagcagatataaggtcagtgccctaacgaggtactgggagcaatataaggtcagtgccttaaagaagtactgggaatgggagtttttctgaatcggaggtaacatggggcagaatttgtctgttgaggaaaaacattatcgtgcagttgcttaaagttttgttgaaacaatctggtgctcaggttaattctcagacattaactaagatgctgcaggaggttattacgcataacccatggtttccacaggcaggcactcctgatgtagaaaattggcacagagcaggagaaggattaaaacaggctcatcaaaaaggtcttaaagttgattcttctgctttctccactaggagtttagttcatactgtccttctgccattatatcctttttattctgctggacagcaggagtcatgttctgagtctaaaaatctgaaagaatctgttgtcccacccacagcaccaattgaaaataaaaaacaggagagggaggataaaaattggcctataccgccccctccagttgcagaaacatctgtaccgcctccttcagtagccgaaatagagacctcaatacaaagaattttatgctctgctgccatagctggagagcccttaggacctctgcacttttcctatttccgtaaggcctgatccaaacaatccacagcagtttattcatgaacactccccactagagtttacgttgttgaaggaattaaaaattaagtgtaattaataatgggatacagagcccattcaccttaggattgctagaatctgtatttggtgctatgcgccttctaccctttgatgtaaaacatttggctcgcacttgtttgtctgctactgcatacctgacttggaatttaaattggcaagaaatgtgtgcagaccaggctagacagaatcatgcttctggacacggagacattacagagggtatgctgttaggtaatggccctttattcagacctggcatgtcaaatggcactcccagatcctgcttatcagcagtgtgcacaggctgctatgcacgcctgggccacaattccagaagagagagtcccagtacaatcctttttacatctcatgcaagggtcacaggaaccctacgtgcaatttcttgcaagattacaagaggcagtgaagcatgaaattcctcataccgctggcacagaaatgctaaccttaactttagcttttgagaatgcaaacgcagattgtaaacgtgcactggcacctgtgaggtgtaacaaaacttgggaaattttctcagaacttgtcaggatgtagaaactgagcttcattgctctgcaattttagctcaagcaatggctaatttagtagttgacaaatctaaaaggagccgacggtcaaaccctaaagtgggaaaatgttataattgtggaaaaactggacattttaaaaaggaatcatgactgatctcagggcagaaaggaccttataatgtggtgccctccacccccatggcccagcggaaaaaaacgccaggactctgtcctcactgtaacaaaggaaatcactgggctattcaatgccgctcaaaatttcatcaaaactgcaaccacctgtcaggaaacgagaagggggcctggacccgggcccctcaaacaatgagggcattcccagttcagaccacaaccccacttcaggggtgggtcccaggaggaacattgattccctcaccccaggaacaccaggaagtgcaggattagatcttccagtcagagaaagaattacattaattggtggagacaaacctatcaaagttcccattggcatttggggacctttaccagcaggatacagtagactaattttaggcaaaagctgccttaacttgcaaggcattactgtagtcccaggagtagctgactctgattatgaaggagaaattcaagtagttttaatgtcacaagatctttgggtttttgaaccggaagaatatattgctcaattattgcttattccctgcaaattacacccttctccataaaaggagaaacgaggaaataaagggtttgggagcacaactacatgagaaatctaatgattcacaacctatagcttataatagacccacctgtgtagtacaaagtaaaggaaagaaattgtatgggcttatggacacaggagctgatgtgtcagtaatatccagtaaggactggcccccagcatggcctctcagactaacctccacatccctagtgggagtaggagcagctaaaagtgttcaacagagtgctgagattttaccttgtcttggtccggatggacaatcatgtactttccagccttatgatgcaaatatagctatcaatttatggggtcaagaattacttacagcatgggatatgagacttacaaatgaaaactttcataacccaggatttaaaatgttgaaggacatgggatatcagagtggaaaaggtttagggaaattcctacaaggaaaccctaacccgatatctataactggagaaacagatagaaaagggcaaggatgtcaggatttctgatggggatcattgatatttctcctcgacccactgccttaccattagaatggctttgtgacaaacctatgtgggtggatcaatggcccctaacacaggagaagctagatcaacttcatctgttggtaaaagaacaattgaatgcaggacatatagagaagagtttcagcccctggaattcaccggtatttgttattccaaaaaagtctggaagatggtgactactacatgatttgagagttattaatgcgcaaattaaaccaatgggtgccttacagcaaggtctaccttccccagcagccattccaagagacaggcctcttgtagtaatagatcttaaggattgtttctttactataccataacacgagaaggataagcctcaatttgccttctctgtgtcttctattaatcatagagaacctgtctctcgctatcagtggaaagttttaccccaaggcatgcttaacagtcctacattatgtcagcattttgtaggaagagcattaaaggagccttgaaatatgtttcccactgtctatatcattcattttatggatgatattcttttggccgctcctacagatcaaattttacatcagttattcagagaaacaaaacaggccttaactaaatggaatctcaaaattgctccagagaaggtgcaaacaacttccccataccagtacttaggaactattgttatggaggggagtgtacggcctcagaaagtagttctccgtaagggcaggttacagactttgaatgatttccaacaattattaggggatattaattggctgtgcccaatgctaggtattgctacttatcaactcacacacctttatcaaaccctccaaggagattcttcattagattctcctcggcaatttactaaggaggcagaagctgagttacagcttgtagaacagatgcttcagcaacaacatgcctcctggctacagccacaaaagcctttgcttttgtttattcttcctaccccccattctccaacaggacttttaggccaattcatagacaaatctgtaatcgtaatagaatggctctttctatctaatcagtgaaatctttgcaagtttatctttctttaattactcaacttataacaataggtaggcataggtcaaaaatgcttatgggatatgatccagataaaattattgttcccttggattcccaacaacaggccacagcatgggaaatgtcgactgcatggcaaatcacttttgcagattttgtgggaataatagataaccattatccatcagacaaaattttgcaattttataaagttcacccttttatccttcctgtaattactcatcacaagcctattccaggtggacagacttattttactgatggctcttctaaaggccgtgcagctatttatggacctaaacatactcaaacaataatgacctctggggtttcagctcaacgctcagacttaattgcagtcattcaggttttacagctgacagcttcagatcctatcaacattgtctgtaattcagcttatgttgtaaatgtagccagttgcatagaaactgctacaattaaaaatacactagacccagaactgcttaatttgtttctaagacttcacacagctattggctctccttcgtctccttttcatatttctcatattcgctctcacacacaacttcctggaccactatctctaggtaatgatagagcagataaactgatgagttctgtgtttcagcaagctcaagcgtctccatgcatttctgcaccaaagtacttctgcctctactcgcatgttccatttstctcgcagccaagctagggctataatacaagcctgtcctacttgccagcatgtccctggagccgcacctgtagaaggttgtaacccatgaggtttggctccaaatgaaatctggcaaatggatgttacacaagtagcagcctttagtaaacttagctatgttctacgaattatagacacttattctcatatgctgcatgctacatgccaaacaggtgagacagctggtcatgtacggcaacattgtttgtcatcatttgctcatatggggatcactaaacaattaaaacctgacaatggaccagcttatactagtcatgcttttcaaatattcttacagctttgagctataacccataaacaaggaatccattataatcctagaggacaaggaattatagagttggcacatcaaacattacaacaagtgttgaaaaaacagaaagggagggataggagaccacttcacacctcaaacaaaactacacttagccttattatctttaaatttttttgactcctggtagagatggtaagactccagcagaaagacattggcaagtgttagaggaaaagaggaaagtttatccgaaagtgttattgaaatcccccggagaagagacaatggaaaggtctgttggatttactgacgtggggatgagggtatgcttgtgtttttcagggagatggacaagccgtgtgggtgccctcaaggtggatgtgaccatggaacgggagactagaggaacccagggtggccaactatgggcctggtccctctggtctgagccatgagccagctgagctagagtgcaaagatggagagaaggccgaccggagtccagacgacatcaacccccataacctgggagcaactcaagaataccaatcaggaagctgggaaactactggagcatcagagccaggcaaaacaccctgattccatgttcttggccatgttagtcataatgtcctgtgtggtatgttttccctgtgcagaggcaaaaacattttgggcatatgttcccaatcccctagtagtacaacctatgctttggagtgacactcctcctgagatttatcgtgatcaggaagtatgggctccaggacccctaactcccctgacaatagaacagttagactctcagaacaatgtcattaattatacgaccccacgagaaggactcctcttgtgtatcactacaaagacatcgcttaactgtagctgtcttataattcaagctcaacaatggttgagtcactatggaaaagtcatgtgcctattaagtcttggttctattaatgtaacaggtgtgctaaccaaccattcccggcccaatcaccctaatcgtgctgactatatggaatggattcccttcgatagttactaccccccctcacatggacccaatgtcttgacccactggctagaaaacaatctatgttaagtggagacattgtggattggggacctaaaggtcttctgtatggaagacatgaaaatcagaaatcatggcacaaacttcgctggcattggtgggaagattttaaagcttcttctttataccacaccgggatctaatcccagtctgccacccagattgcttgacatggagcaggctttagcccgcctcttcctcagtggcattatctagggaggaaaggaccaatccaagagatgttatggaaggcagcactcccatttatgaatggagcatctgggttcgggatactatccagtgatagcaatagtaagcaacacagtcttaatgttacatttgtaaagaatatcaccactcaatttatggtttgtctttttaatccttatgcttttttggcgactaagaaggaccagctccaggtaaacaatatccaattgacctgtaaatcttgccagttatgtcactgcattaatcatagcacattgcaaacacataatgtctctactttgataattttgggtcgcatccctgggctatggattcctgttaatctgtcccagccttgggctaccacacctgctttgcactttatgaaacatcttctaactcagcttactcattgtgcccgtagagccttaggcatgataatttttgctattgtttccttggtcacattaataacttccgttgtgatgtcctctgtagctttgcatagttctattcaaacaactcagtacatggaaaactggatgcgtatagccaaccaagcatggccacttcagaataaaattaacactgagttacaaactgaagtggcattgttgaaatccacggctctatggttaggagaacaagtacaaagcttgcaattgcaacagcaattgcatgatcattttaatcacactcatatttgtgtaaccaacttagaatataaccaaagtgagtatccatgggaccttgtgaaagcccatttgcagggagcttgcacatccaacatcacctttgatatcggtgaattacaaaacaaaattcttgatttaaatggacaaactcaagagtttcagccttctttagaagacgagaccaaattccagcaaggcctggagagcctcaacccttggaccagtctaaagcaccacattaacatcttatatgtagtccttggaataatgttgttttgtctctgtcttctgttcatagtctgtaaaactggatggactgccaatcagaaaatgagagctgcccagcctgaccttacattctttcaattaattcataaacagaaagggggata

SEQ ID NO: 39 - DNA, 5937 bp, Homo sapiens
  repeat_region (1)..(5937): hervk9i
agtggcacccatacgtgggggctcgaatccaggttgaagggtcgccagagcgacggttggagaatggagaactaagctggaggacacccgagtactcttaaagcaatccccgtggtgagtaagaaggggagctcggaagcgtcagggtaacaatgggacaagtgtgggctctggttcgttccaccttggaactttttcacactgatgatgaggaggaacgagagtatagcgaagtaacagaagaggttacagagcaggtttatttgccagctaaagctaaagtggcaaaggaggaagaggttcatccctacccttctgcaccccctccttattattttgaagaaaaagagtggcctgaccctccagatctttcttttccggaggacactgggcgaaaagtagttgccccagtgactgttcgagcagcgcctcgagcgaccgctctcagttctattcaggcaggaattcagcaagctagacgagagggtgatatagaggcttggcagttccctgttagaatacaccccccagatcaacagggaaatattatagctacatttgagccttttccttttaaattactcaaaaaatttaaacaagcaataaatcagtatggaccaggttctccttttgtaatgggactgttaaagaatgttgctgtttccagtcggatgattcctactgactgggacactcttactcgagcttgtctaactcctgctcagttcttacaatttaaaacttggtgggcagatgaagcttccattcaggctgctcgcaatgcccaggcccaacctcaaattaatataactgcagaccaacttttgggggtcggcggctgggctggtttagatgcacaagtggtcatgcaggatgatgccatagagcggcttagaggagtgtgcattagagcttgggaaaaaatcacttcaggtggagaacaatacctttcctttagtgctataaaacagggaccaagagaaccgtacgttgattttatagctcggtatctcttaatacaggagtctcttaaaaagatgatttcagattcggctgctcaggatatagtgttgcagttattagctttcgacaatgctaatcccgattgccaggctgctctgcgacctatcagagggaaagcacatttagttgattatatcaaggcctgtgatggtatcggaggtaatctgcataaagctaccttgttggcacaggcaatggcaggactgagagtggataaaggaaatactccatttcctggagcttgttttaactgtgggaagcatggtcatactaaaaaagaatgtagaaaaaatcagcgagtcaggccaccagataggggaaaaaagaaaactgctgagcctgaaatatgtccaaaatgtaaaaaaggaaaacattgggctaatcagtgtcactctaagtttgataaagaagggaacccgatttcgggaaacgccatgaggggcccgtcccgggccccattctaaactggggcatttccggctcaggccattccctcacccctgtacaatgtctgtcccccgccacagccagtagtgccacagtagatttatgctgcacaaaagctgtgagccttctgcctggggaacccctgcaaaaggtcccaacaggagtctgtggacccttgccagcagggacgataggattacttttaggaaggtctagtttaagtttaaaaggcatacaaatacatacaggagtcattgattcagattacaatggggaaattcaaattgttatatctacttctgtttcctggaaagcagagccaggagagcgcatagcacagctcctgattgtgccgtatgtgggaatgggaagaagtgaaattaaacgaacaggaggatttggaagcacaaataaacaaggcaaagcagcttattgggtaaatcaaattactgataaacatcctacctgtgaaataactattcagggaaagaaatttaaaggtttggtagatacaggagcggacatttcaatcatttctctacagcactggccgtctgcgtggccaattcaacccactcaatttaacatagttggagttggtaaagcccctgaagtatatcaaagtagttatattttgcattgtgaagggcccgatggacaacctgggactattcaaccaattataacttctgtacctataaatttatggggaagagatttattacaacaatggggagcacaagttctaattccagaacaattatatagccctcgaagtcaacatacgatgcatgaaatggggtatgtccctggtatgggactagaaaaaaatttgcaaggtttgaaagaaccgcttcaagcggaaaaacaaagttcccgccaaagtttaggaaataatttttgatggcagccattgttaagcctccagaacctatacctttaaaatggttaacagataagccaatttggatagaacgatggctgctaagtaaagagaaactggaggctttagagaaattagttactgaacaattagaaaatgggcacatagctccaacattttccccttggaattctccggtttttgtaattaagaaaaaatcaggtaaatggagaatgttaactgacttaagagccatcaattcagttatacaacctatgggagcattacagccaggattgccttctcctgctataattccaaaaaattggcctttaatagtcatagatttaaaagactgtttctttactatccccttagctgagcaagactgtgaacggtttgcatttacaattcctgcggtaaacaacctgcagcctgctaagcgtttttattggaaagtgttgtcacagggcatgttaaacagtcccacaatttgccaggcctatgtggggcaagcaattgaacctactcataaaaaattttcacagtgttaaattattcactatatggatgatatatactttgtgctgcccccactcaggaaatattactccaatgttatgatcacttgcaaaattcgatttctcacgctggtttaattatagctcctggcaaaattcagactactactccttactcctacttggggaccttagtaaatgacactaccattgtgccacagaaagtaaccatacgtagggatcaactgaaaacattaaatgactttcaaaaattactaggggatattaattggatacgacctgctctaggcattcctacctatgccgtgagtaatctgttttctatccttagaggaaatcctagtctcactagccctcggcaattaacaaaggaggctgaggcagagttacaactgattgagaagcaagtccataaagctcaaataaatagaatagattcagagaagactctagacttgctatttttttcaactcagtattcacctactagtgttttcgtccaagaacaggacttagtaaagtgactttttcttccacatactaattcacggactctaactccttatttagatcaaatcgctactatgatagggattgggagaaatcgtattgttaaattacatggatataatcctggaaaaattattatccctctcatgaaggcacaaatacagcaagcttttataattagtcttacttggcaaacccatttagctgacttcgtgggtattgttgataatcactttcctaaaacgaagctgtttcagtttttgaaattaactaattggattctccctaaaataactaaatttaaaccaattgaaggtgctgaaaatgtttttacagatgggtctagtaatggtaaagcttcttattctggatcaaaaagtaaagttttccagacgccctatacttcagctcaaaaagcagagcttgtagctgtaattgaggtattgactgcttttgatatgcctattaatgtgatttctgattcttcatacatggttcattccacacagttaattgaaaatgctcagttatgatttcatacagatgaacaactgatgactttatttacccaattgcaaacagcagttagaagtagaatgcaccctttttacatcactcacattagggctcatacacctcttccaggacctttgactgaagggaatcgaatggctgatcgcctagttgctaatgcaatatctaacgctagacactttcacaatttaacccatgttaatgcctctggtctcaaacacagatacagcattacctggaaagaagctaaaaatattatccagcgatgcccaacttgccaaatggtacattcctcatcttttacaggaggagttaatcctcgaggattggaacctaactctctttggcaaatggatgtcacacatgttccctcgtttgggagactagcttatgtacatgtatgtgtggacaccttttctcactttgtctgggctacatgccaatcaggagagtcttctgcctgtgttaaatgtcaccttttgcagtgttttgcggtgatgggcattccagcttctattaaaacagataatgccccaggctatactagccaagctctagctacatttttctctatatggaatattaaacacattactggtatcccatataattctcaaggacaagccatagtggaaagaatgaatctctccctaaaacagcagttgcaaaagcaaaaagggggaaacagagactacggaacaccccatatgcaattgaatctagcattattgactttaaattttttgagcctgcccaaaggccagatgctatcagcagctgaacagcatctacagaaaccagctgcaaagacagaagcagaacaactggtttggtggagagatccgataacaaaaagttgggaaataggtaaaataataacttggggtagaggttatgcttgtgtttctccaggccaaaatcaacagccgatttggataccatcaagacacccgaaaccttatcatgagccagatgccgaggaagagattccgggaggatcccgaggaccccccggttgcagccatgtcaagactgacgctgaggaggaccccaactgtcacgagcaacacccgttgaacacagccacccacctggggacagatcaagaagctgtcacagatggcggaagaaaacctgaggaaagcgggacaaccggtcacaatgaataatttaatggtagctatgatagtggttatcaccactgtcatgagtattccttcaataaggggtgacacagagaacaattatacttactgggtctatttatcaatcttggctggcaataatgcctggatgcaatcactttatgacacagttacacatgctttctgatctcggtatttaccataatcaatctgctcctataatcgaggcataccgccctcaaaaacctatttgtaaacaggattggacccagttagaaaaaatgaacgtacttgtttaggaagattgcattgcagaacaggcagaggtgtcgcacaacgattcctatggaatcattagtagttggtcccctaaggggatgtttagctcgaattgcacctctcagtctgcgtgccatggccacactatgttcagctggtctgaacaaaacggtcagatggtagatataataataagtatagcaagagttcctattatctggaaccatggcggtatagtggcacctcaacctcaaaagatatggcccgctctaggagcttagcgtaaggatttaaaattaaaagaacaaatatttaaagcatcccaggcacacctgaccttaatgccaggaactggagtgcttaaaggagctgcagacgaattagcagctagtaacctattaaaatggataaaaacacttggaagctctgtgatttcaatgatgactgtgcttttaatctgtgttgtttgtctttgtatagtctgcagatgtggatcccgactcctgcgaaaagtagctcaccgtgacaaagccgcccttgcttttatctctttgcaaatcaaagaagggagaca

SEQ ID NO: 40 - DNA, 5262 bp, Homo sapiens
  repeat_region (1)..(5262): hervkc4
ttctggcgcccaacgtggggcccaaaagaatctggtgaggaaacgctcaagcatgtgaaacagaggaccaacgaacaaaggactcccaaggacataaaagttttaacctctacaggtaagcggggcgcccagagaaagctagggacacaatgggaaaaactgaaagtaagtacaccacgtatttgagcttcctacggcagctcttcaagcatgcatggtggggtaaaagttgatacggaaaatcttatggatttgtttcatgctatggaacaattttgcccttggttcccaaaacaggaaactttgaaattaaaacattaagaaggagttggaaaggaccttaaaagagcatatagagaaggaaaggaaattcctttgcctgtttggtcgctttggtcattggtgcatgcagcactggagccttttcagacagataatgaggctgagtcagaggaggagagagaggagtttgataatcagaactctgaaccacctctaccgagtactaacaaaaaggagagtctgaagatgatttatgccaatctccccagtctccctaaacctactcaaaaaattgttcagcccacggttcctgtagagaaatgtccagaatggccacctcctcctcagccgagtgggtgcagggggagggagcccgagacttggctcaccgtgcccattattgcccgacccacagttcattatggagatggggcaattcaggttcaccctacagttattacagtgaaggagcaatttcccttaaaatggatgacccggcgccccgtctgggttgaacagtggccgctccctaaggaaaagttgggggtgctttataaaataaactactaaaaaaaggatatatttcacccactttctctccttggaattccccagtatttgtaattaagaaaaagtccggtagatggcgtcaacgctgtaattcaaccgatgggagccttacaacctgggctcccatcccccactgtgctccctaaagactgaccgcttgttattatagatttaaaagactgcttttttacaattcctttagcagaggcagatttcaaaaaatttgcctttaccattcctgccgttaataacaaaaaacctgcagccaaatatcattggaaagttttgccccagggtatgttaaatagtcccacagtttgtcaaacttttgtaggcagaactatccagcctgttagagatcagtttccagatttgtgcagcaaaaagtagagaccaacttattcaatattattaatctttgcaaaagacaattacaaatgctgaattacttatagcacctgacaaaattcaaacaaccactccttttcagtatttgaaaatacaagtacaggatagagccattaagcctcaaaaggttcaaattagaagagattctttcaaaaccttaaataattttcaaaaattgttagaagatattaattggatttggcccaatttagcaattcctacttatgctatgtctaatctcttctcaatattgaggggaaataccaacttacgcagtaacagagaactaacacccgaggccatgaaagagttatcagtaattgaaaacaaaattcagcaagcccaggtcagtaggattgactcagacttgcctttataattcattgtgttccctacttcacactaaccacacaataatgggggttattgttcaaaatgatgatttagttaaatggtcctttttgccacataataccataaaagcacttacagtatacttaaatcagatggcaattctaattggacaggctcatatatgaattattaaactttgtggcactgagcccaataaaaattatagttccaataaataaaaatcaggttaaacaggcatttattaactcagttacatgacagattaatttaacaaaatttgttggatgtattaataatcattatcctaaaaacttttcaattcttaaaattaactacataggttcttccaaaaattacttgtgatgcccctttggaaggagccatagctgtttttactggtgggtctggtaaacatgaaaaagcaacagtctggtggagaccacataatccaatcacttgatctgaatttactaacattcagagagctaaggttattctgtgtatttatttaaaaactattacagccttaagtttgctctggagcccactctgtgtggtctttttcttcaacttcaacaattactagaccaaggtacacatcctacttttattacacacattcgagcccacagctctctgcctggcccattggcttacggcaataatcaagcagaccttcaggttatgacatcactgcttgaccaagccacccaatcacatcgattattccaccaaaattggagaaacttatctaaataatttcaacttacacagaggctggctaaacaaattatcccacaatgcccagattaccagctcacaggcacataccctccttcaataggtgttaaccgtaaagaattggaacctagtcagttctggcaaacagatgttaaacacatcctaaattttaaaaactaaaatatgtacatacatccattgttaccaacactcatctaattattacacatttaaaaaaataaaagtaaaaaaaagactaagacaaaaatcaaaaaaatacaaaaaagtaaaaaaatttaaaaagttataaaaatgtacctttagtaaaaaaattataaaacataaaaagttaagacatgttaaaaattgtctgtaaaagtcataaaaaaagttataaaaaatttatataaaaaaggttgtttaattttgttttaaagatctaaacaagttttaaaatgataattgtaaaaaattccgtgtgtaaacatatttactaaagttaaaaagatatcatccagttttctataaactaaacattaaaataaaacacaagtttttcttaaaacactaacctgctctttaaaaattgtaaaaagtctcttaacacagacgccactcctaaaatttccagtaccagcctaaagactacatcctcatcaaaggataaaaaattaaaaaataaaaaaacatttgaaccagcctaaaaaagaccctacaggaactacagcctcaacaatgcgacttccacaaacaacacaggcctcagacattatactaaaaaaacaaaagtctaagccaaataatttattcatttttaattctctcactttgcctactacctatacctgctacactgtattaagctcgtatcttaaatccgcctttcttctgccctgttactttaacaaacacccccttctcagcttctaataacataactgcttagctagaataaattaacatacccccagtggggttcctcattaataacatatagtaaactaagatgccaagtaacactacaggtcactcttttactaaaaaaaaaagttactaattatactcatgtttgtcttctgttatttactaatcctagaatacaaagccaaaataaaaacagtgacctcctcgcctaacaaacctgtggctacaacagcccaaaattatacctattgggcatgtgtcccattcctgcctttaattaggcctgtcacatggttaaaacccccagttgaagtttatgttaataatagcgtttggatccctaagcctacaaatactcatgggccctctcacccaaaggaaaaaaaaaaaagttaataaatgtgtccataggttatcagttcccccctctttacataaggccaactatcggttgcctaaaaggctaccgacaacattgactagttaaaattccaggtcataatcaaagaccagtatcctatcatttattttctggatggagcccggatcattcacagagttcaattcaattaacagtttaagcccccaaaaaagaggtgccaacaaccttaacaatggtcaaataatttaaaaatattaattaaaaaaaattacatctctgatcacactatggtactacaaaataattcctatgaaattgtcattaattggtcccctgaggggacctttacagttaattgtacccatcaaaataataaatacaagacaaaactaaaacagaaactatactatcaaaaaggtaacactacttacactgaaaaacgtgctcattttcccataatttggaccaattttagtacagctggcccacatcccaaaataattaatccaataataggccctaaacactccaaattatgaaagttaataatggcccaatctcatatttaagtttagaaaaaaatatattatctttaaaaaaaaaaggttaaaaacttcaatttgcgtatcagttttcttccaacaaaacagtgcccattcagagttgtgtcaaccctccttttatgttaatggtcaaaaatattgacattcgacctaattctcaaactattacttgtcaaaactgtcaccttttcacctgtattaattccacgttcggtgtaaaaacatctgtgttactgataaaaactaagaaaggagtttggatactggtttccctcaatagaccttagaaagcctctccttccattcatattgtcacaaaaatgttttaaaaaaaagtgtttaccaaaacaaagagatttatttttacccttataacagtcttatgggccttattgcagtcacagctactgctgcggctgctggaattgctttacactcctctgttcaaactacaaaatatataaatagttaacaaaaaattcctcaaaattgtggaattctcagacccaaatagaccaacaattgacaaatcaaacaaatgatcttagacagactgttatttaaatggaagatcgtacaataaacttaaaacatcaattagaagtacaatgtaattgaaatacttccaatttctacataactccccattcgtataatactactaaacatcatttttaaaaagttagacatcatctaaaagaaaaaaataaaaatttaacattaaatataaccaaattttaaaaaaacaggtttttaaagcatctcaggctcatttaaccctcctgcctgagactgacattctcattggagctactgacggactttcaaatataaatcctcttaaacagattaagaccattaaaggatcaactattacaaattttactttaatgtgtatctgtttatgctgtttacttttagtctacagatgcaaaagacacttctgaaaacagaccaaacaccacaaataagccataatagcaatagcggttaaaaaaaaaaaaagggaggggggca

SEQ ID NO: 41 - DNA, 5654 bp, Homo sapiens
  repeat_region (1)..(5654): hervl
gattttggtaccaggagtggttctagaggaacagaatattaaggatggagttctttcgttggttttggggtttctggagttggctgcttaatatgattagacccaaaaatgctaaggactctacttctaatagtatggagaacactgatagtccttggcatgaactgtttagagagttatgcaaaataaatgcatttgacactcctgattcaccgctcatgagaggcaaggagtttagtgactctatacataatacctttgaccatatgtggagaaccaaggaacataatgaagctggttggttgctcctaagttcagtggacaaagtgatgaaagaaaatgatgaactcagggattctgtctcccggcttcagaagcagatactgagcctcaaatctgctaagattgccctgagtgagagtcttatctcctgtagagaaagagctgaaattgtggaaaaacagacacaagctcttatcatgcgagtggctgacctgcaatgaaaggtgcatgcacagcctcgccaggtgtctactgttaaagtgagggcattgattggaaaagaatgggaccctgcaacttggaatggggacgtgtgggaggaccctgatgaagctggggacactgagtttgtaaactctgatgaaccttttttgccagaagaaacagcttccccatccccagtagtggcaacatcccctccccgacccatgctgccatcagcctttccacctttgtctgaggagataaaccctgcgctgcctgaggcaacagtgatggcctcccctgaggcagttgccaggcaagataatgttgattctcctcaggagccacccccaacacccctgtttgcttctagacctataactagactaaagtcccggcgggcccctagaggtgaggttgagagtgtgacccatgaggaggtgcgctacactcgaaaagaactgtttgagttttctaatttatataaacagaaatctggagaacaggcatgggaatggatattaagggtgtgggataatggtggaaggaacatagagttggatcaggctgaatttattgatttgggcccactaagtagggactctgcatttaatgttgcagctcagggagttaaaaaaggttctaatagtttatttgcttggttagctgaaatatggattaaaagatggcccactgtgagcgagctggaaatgcctgatctcccttggtttaatgtagaggaagggatccaaaggcttagggagattgggatggtggagtggattagtcactttagacctactcatcccagctgggagggtccagaagatatacccttgaccaatgccttgcgaaatagatttgtgagggcagcacctgcatctttgaagagccctgtaattgctcttctctgtatgtcagatctaacggtgggaaccgcagtcactcaactacaaaatttaaatacaatgggaataattggatcccgaggtggcaggggccaagtggcagcactcaaccgtcaaaggcaaggtgggcatagctaccgtaatggacagcagaggcaaagcggcaatcagaatagtctgactcgtgtagagctctggcattggctaattaatcacggtgttcctagaagtgaaattgataggaagcctactgcattcctacttaatttatacaagcagaaaacttctaggtcgaatggacaaaagactaatttgaattataaaaacagagaatcatggcccctcaatcaatttccagacttgagccagtttacagacccagaaccccttgaatgaaggggaggccgggtccccttgaggaaggaccccactacattactgacaatttatgcagtgaatctttctcccatccttccccaaggagacctctggccttttaccagggtaactgtgcattggggaaagggaaatgatcagacattttggggactactggacactggctctgagctgacgttgattccaggggacccaaaacgtcattgtggtcctccagttaaagtaggggcttatggaggtcaggtaattaatggagttttagctcaggtccgacttacagtgggtccagtgggtccccggactcatcctgtggtcatttccccagtgccagaatgcataattggcatagacatacttagcagctggcagaacccccacattggctccctgactggtagggtgagggctattatggtgggaaaggccaaatggaagccattagagctgcctctacctagaaaaatagtaaatcaaaaacaatatcgcatccctggagggattgcagagattagtgccaccatcaaggacttgaaagacgcaggggtggtgattcccaccacatccccgttcaactctcccatttggcctgtgcagaagacagatggatcttggagaatgacagtggattatcgtaagcttaaccaagtggtgactccaattgcagctgctgtaccagatgtggtttcattgcttgagcaaattaacacatctcctggtacctggtatgcagccattgacttggcaaatgcctttttctccattcctgtccataaggcccaccagaagcaatttgccttcagctggcaaggccagcaatatacctttactgtcctacctcaggggtatatcaactctccggctttgtgtcataatcttattcggagagaccttgatcgcttttcgcttccgcaagatatcacactggtccattacattgatgacattatgctgattggatccagtgagcaagaagtagcaaacacactggacttattggtgagacatttgcgtgccagaggatgggaaataaatccgactaaaattcagggaccttctacctcagtaaaatttctaggggtccagtggtgtggggcctgtcgagatattccttctaaggtgaaggataagttgctgcatttggcccctcctacaaccaagaaagaggcacaacgcctagtgggcctatttggattttggaggcaacacattcctcatttgggtgtgttactccggcccatttatcgagtgacccgaaaggctgccagttttgagtggggtccagaacaggagaaggctctgcaacaggtccaggctgctgtgcaagctgctctgccacttgggccatatgacccagcagatccaatggtgcttgaggtgtcagtggcagatagggatgctgtttggagcctttggcaggcccccataggtgaatcacagcggaggcctctaggattttggagcaaggccctgccatcttctgcagataactactctccttttgagagacagctcttggcctgttactgggctttggtggaaactgaacgtttgactatgggtcatcaagtcaccatgcgacctgaactgcctatcatgaactgggtgctttctgacccatctagccataaagtgggtcatgcacagcagcattccatcatcaaatggaagtggtatatacgtgattgggctcgagcaggtcctgaaggcacaagtaagttacatgaggaagtggctcaaatgcccatggtctccactcctgccaccctgccttctctcccccagcctgcaccgatggcctcatggggagttccctatgatcagttgacagaggaagagaagactagggcctggttcacagatggttctgcacgatatgcaggcaccacccgaaagtggacagctgcagcactacagcccctttctaggacatccctgaaggacagtggtgaagggaaatcttcccagtgggcagaacttcgagcagtgcacctggttgtgcactttgcatggaaggagaaatggccagatgtgcgattatatactgattcatgggctgtagccaatggtttggctggatggtcagggacttggaagaagcatgattggaaaattggtgacaaagaaatttggggaagaggtatgtggatggacctctctgagtggtcaaaaactgtgaagatatttgtatcccatgtgagtgctcaccaacgggtgacctcagcggaggaggattttaataatcaagtggataggatgacccattctgtggacaccactcagcctctttccccagccacccctgtcatcgcccaatgggcccatgaacaaagtggccatggtggcagggatggaggttatgcatgggctcagcaacatggacttccactcaccaaggctgacctggctatggccactgctgagtgcccaatttgccagcagcagagaccaacactgagccctcgatatggcaccattcctcggggtgatcagccagctacctggtggcaggttgattatattggacctcttccatcatggaaagggcagaggtttgtcctcactggaatagacacttactccggatatgggtttgcctatcctgcacgcaatgcttctgccaagactaccatccgtggactcacggaatgccttatccaccgtcacggtattccacacagcattgcctctgaccaaggcactcactttacggctaaagaagtgtggcagtgggctcatgctcatggaattcactggtcttaccatgttccccatcatcctgaagcagctggattgatagaacggtggaatggccttttgaagtcacaattacaatgccaactaggtgacaatactttgcagggctggggcaaagttctccagaaggccgtgtatgctctgaatcagcgtccaatatatggtactgtttctcccatagccaggattcacgggtccaggaatcaaggggtggaagtggaagtggcaccactcaccatcacccctagtgatccactagcaaaatttttgcttcctgttcccgcgacattacgttctgctggcctagaggtcttagttccagagggaggaacgctgccaccaggagacacaacaacgattccattaaactggaagttaagattgccacctggacactttgggctcctcctacctttaagtcaacaggctaagaagggagttacagtgttggctggggtgattgacccagactatcaagatgaaatcagtctactactccacaacggaggtaaggaagagtacgcatggaatacaggagatccattagggcgtctcttagtattaccatgccctgtgattaaggtcaatgggaaactacaacagcccaatccaggcaggactacaaatgacccagacccttcaggaatgaaggtttgggtcactccaccaggaaaaaaaccacgacctgctgaggtgcttgctgaaggcaaagggaatacagaatgggtagtagaagaaggtagtcatcaataccagctacgaccacgtgaccagctgcagaaacgaggactgtaattgtcatgagtatttcctccttcttttgttaaaaacatgtttgtgcatgtatacacttgtactaagaaaatatcttcattttatttccttttccttttatcatgtgacataagatttattgacttcatatcagcatttaagtattgttaactttatgtaatagtatttgggttggggattggtgcgtttccggttgtacgaaggatagttgtattatgttaggcgtaattatgaccttattattgtctttatttgaagattatgtatgatctcaggagatgtgtatgggttcaagttgacaaggggtggact

SEQ ID NO: 42 - DNA, 3037 bp, Homo sapiens
  repeat_region (1)..(3037): hervl68
  misc_feature (8)..(8): n is a, c, g or t
  misc_feature (14)..(16): n is a, c, g or t
  misc_feature (19)..(20): n is a, c, g or t
  misc_feature (26)..(26): n is a, c, g or t
  misc_feature (178)..(178): n is a, c, g or t
  misc_feature (220)..(220): n is a, c, g or t
  misc_feature (234)..(234): n is a, c, g or t
  misc_feature (300)..(300): n is a, c, g or t
  misc_feature (304)..(304): n is a, c, g or t
  misc_feature (313)..(314): n is a, c, g or t
  misc_feature (339)..(340): n is a, c, g or t
  misc_feature (344)..(344): n is a, c, g or t
  misc_feature (349)..(349): n is a, c, g or t
  misc_feature (364)..(364): n is a, c, g or t
  misc_feature (368)..(368): n is a, c, g or t
  misc_feature (370)..(370): n is a, c, g or t
  misc_feature (373)..(373): n is a, c, g or t
  misc_feature (378)..(378): n is a, c, g or t
  misc_feature (384)..(384): n is a, c, g or t
  misc_feature (386)..(386): n is a, c, g or t
  misc_feature (389)..(390): n is a, c, g or t
  misc_feature (395)..(396): n is a, c, g or t
  misc_feature (398)..(398): n is a, c, g or t
  misc_feature (489)..(489): n is a, c, g or t
  misc_feature (534)..(534): n is a, c, g or t
  misc_feature (559)..(559): n is a, c, g or t
  misc_feature (595)..(595): n is a, c, g or t
  misc_feature (619)..(619): n is a, c, g or t
  misc_feature (628)..(628): n is a, c, g or t
  misc_feature (655)..(655): n is a, c, g or t
  misc_feature (677)..(677): n is a, c, g or t
  misc_feature (708)..(708): n is a, c, g or t
  misc_feature (852)..(852): n is a, c, g or t
  misc_feature (967)..(967): n is a, c, g or t
  misc_feature (985)..(985): n is a, c, g or t
  misc_feature (1035)..(1035): n is a, c, g or t
  misc_feature (1218)..(1218): n is a, c, g or t
  misc_feature (1227)..(1227): n is a, c, g or t
  misc_feature (1357)..(1357): n is a, c, g or t
  misc_feature (1359)..(1359): n is a, c, g or t
  misc_feature (1381)..(1382): n is a, c, g or t
  misc_feature (1384)..(1384): n is a, c, g or t
gcactrtntgggannnttnntggaanggaagaagagggaagatggatgacaaaattatgcctgggtvgctatggagttattcatggtatraaayagcagctragctgctgtctgttatgagaggtaaaagttacctgtgraatttgaaaatgatagatccaatcacagagagttggcnysctggatcccytggctgcttttggccwtkctggctaaagtnaggaaraarcacancycarrtgatgtctttggtttttgttctytcctccarktgggaggagaaagggcccaaacattccnaaangtgagcttnntwtgsaswaaagwyawwaacaktwnnttgnagttntcttctccaggtggnaggngnaangrtcngaaaantnctnnaggcnngnwttgagtgrrccaaraatgttaaaagtttgcattgctctctcctccaagtggaagraaaaargttaaatcagttcccagggctggagyaangctttagataaaccagaggaggagaaaaagtaaaaaaaaagcccnccaaacaagwaaaccactctagccntttctacagcttagctgctgcyacagcaactcaacnccctcctttcmctacaaccttcanctccagcanctgtaatgttaaccytgtaaadtgctnaatttactgctaggggtttgantaaacatghaatgagtaaaaagaaggaaatnattatwgaatsrctttgtattttgtggctattgcatctggatgtatgataaaaattratgtaaaatgttatatgcttgtaatttcataaatgctagaggaatcatcctaatmgggaaagctgcaaagaaaaaaaagttagtggnawcacaactcccttgctttytgctgcyggtgggtggattggaatttaaactctttgagtattggaaasagaacaagtctccataactgatgatttttgcctattggarcctctgnaaaaagggagacaacatnaaaagagaggcaatctccagatggagatacacttttggagttttaaaaanyagtttttagtttgctaatgwgctcttgytgaaatgagatgtctgacccttagaggctgatgattttcagcctgatgtgcatgatttttgagggggtcaatttggactctaaractgacaagataaaaaggmctyttagaaaagccttgcttgtcacttggacttggaatacagctgtctggntcttcagtntctcagctttgctgctgctgaagaaaagccactggcttttttggaatcctgaattcacagatcctaattgcctgtacctgactctaagctgaaacctcatactgtctgctgtgrgctgtttcagcctcgngntgagctgtgctgaactgaaatnngntgaaatggctcgactcaatgaacagaactcagactctgggactgttgcagatttaggaccaccctctgtggggccataaactatgaaaacatcacggatgctggctggactgtctgggtcacatacagatgcccacaggaaagggcttgttctctgatgggaccatctaaaattgagctgctgattggctctatatttctgatacagagactaattgcattcttaacttgtgatttctgtcgaaagctgcaagttgggggagggcacattacaagaagtgtgacccctccacccactcctgacagattggacttgaccccctctcggggatgtctcactgctattgacttgttgtgttcggctttctggattagttgcagtttgcaacaatggactgacagcctgagtctacttccctcacctttctcctggtacacacatcttagtgagacagtttgattattaaatgcagctgtccccagaaagggattgatcttttttttcctaggctgctcaccggataaatgatcaggacgaaaagggtgggaaggttatgtaaactcattttgaaaaattttgaaaattcagaattcatcctgaccaatttctgaacatgatgtgtctttccggttaagttgtataaaaatgtttttctataaaaatgtttttgtccctcttgcatacaacccttccagacaaaaggtctgggtgagagtaagagatgattggagaaatatgaagttaagattgtaagttatgaatattgctgaatgggacacactgattttgtaacaacggagaaaaaagaaaaacctatggaggcacggggtgtgagagagggcattaatgatctttgtttttcagaactgctcctggaagctttcccctcttcctgaagaaaaattccccatgctgcctttccaagctgctgcgagcgctttgaattcaaactgactgctgagcctaagatcacacctgacagcgctgactatgagacagcagggggtggccccagctcctgcactttccacgaagaacacctccagatgtcatccacacacatgagacggatgaactggtgtcatggacaagcaaaactgtttggaactgactgcctttaggcagtccctctgaaaccaaggactaaactgaattaattggactagactctttgggagtagtccccgtggtaagaggccacactggggaccctgttaacctgtactgcctgactaatgtatgtcctgcttggggtaccctaacaattgtaaactctttgtttccaggggtaccacgtgtgccctctgggattgtacttttatgtgtaccctgactatcatgacactgcctcagccctggaaggctttcaggtcagcttcaacttactggccagagttgtgctgtgcctgaattgatgcctcaggccaraaaaaaaaaggttaatacagaaacttaaggaggaagccacctggctttctaagatagacctttatggttaatgggatttgttttaactggctaaattcaggacccctaaagggcataaactgagatcaatactgcaggttggtctcaccctgctgcgtggggtcctactgataataattttgctgtaaagatgccttggccaagggggtggactgtgcagaagag

SEQ ID NO: 43 - DNA, 5530 bp, Homo sapiens
  repeat_region (1)..(5530): hervl_40
  misc_feature (474)..(474): n is a, c, g or t
  misc_feature (586)..(586): n is a, c, g or t
  misc_feature (659)..(659): n is a, c, g or t
  misc_feature (680)..(680): n is a, c, g or t
  misc_feature (769)..(769): n is a, c, g or t
  misc_feature (809)..(810): n is a, c, g or t
  misc_feature (821)..(821): n is a, c, g or t
  misc_feature (874)..(874): n is a, c, g or t
  misc_feature (876)..(876): n is a, c, g or t
  misc_feature (884)..(884): n is a, c, g or t
  misc_feature (891)..(891): n is a, c, g or t
  misc_feature (901)..(901): n is a, c, g or t
  misc_feature (1136)..(1135): n is a, c, g or t
  misc_feature (1184)..(1184): n is a, c, g or t
  misc_feature (1295)..(1295): n is a, c, g or t
  misc_feature (1299)..(1299): n is a, c, g or t
  misc_feature (1441)..(1441): n is a, c, g or t
  misc_feature (1463)..(1463): n is a, c, g or t
  misc_feature (1490)..(1490): n is a, c, g or t
  misc_feature (2214)..(2214): n is a, c, g or t
  misc_feature (2216)..(2216): n is a, c, g or t
  misc_feature (2279)..(2279): n is a, c, g or t
  misc_feature (2302)..(2302): n is a, c, g or t
  misc_feature (2382)..(2382): n is a, c, g or t
  misc_feature (2440)..(2440): n is a, c, g or t
  misc_feature (2465)..(2465): n is a, c, g or t
  misc_feature (2494)..(2494): n is a, c, g or t
  misc_feature (2503)..(2503): n is a, c, g or t
  misc_feature (2512)..(2512): n is a, c, g or t
  misc_feature (2883)..(2883): n is a, c, g or t
  misc_feature (2885)..(2885): n is a, c, g or t
  misc_feature (2888)..(2888): n is a, c, g or t
  misc_feature (2904)..(2904): n is a, c, g or t
  misc_feature (3015)..(3015): n is a, c, g or t
  misc_feature (3105)..(3105): n is a, c, g or t
  misc_feature (3114)..(3114): n is a, c, g or t
  misc_feature (3151)..(3151): n is a, c, g or t
  misc_feature (3202)..(3202): n is a, c, g or t
  misc_feature (3335)..(3335): n is a, c, g or t
  misc_feature (3373)..(3373): n is a, c, g or t
  misc_feature (3500)..(3500): n is a, c, g or t
  misc_feature (3651)..(3651): n is a, c, g or t
  misc_feature (3676)..(3676): n is a, c, g or t
  misc_feature (3696)..(3696): n is a, c, g or t
  misc_feature (3726)..(3726): n is a, c, g or t
  misc_feature (3793)..(3793): n is a, c, g or t
  misc_feature (3800)..(3800): n is a, c, g or t
  misc_feature (4045)..(4045): n is a, c, g or t
  misc_feature (4263)..(4263): n is a, c, g or t
  misc_feature (4399)..(4399): n is a, c, g or t
  misc_feature (4429)..(4429): n is a, c, g or t
  misc_feature (4458)..(4458): n is a, c, g or t
  misc_feature (4528)..(4528): n is a, c, g or t
  misc_feature (4554)..(4554): n is a, c, g or t
  misc_feature (4599)..(4599): n is a, c, g or t
  misc_feature (4643)..(4643): n is a, c, g or t
  misc_feature (5067)..(5067): n is a, c, g or t
  misc_feature (5204)..(5204): n is a, c, g or t
  misc_feature (5269)..(5269): n is a, c, g or t
  misc_feature (5317)..(5317): n is a, c, g or t
  misc_feature (5401)..(5401): n is a, c, g or t
  misc_feature (591)..(591): n is a, c, g or t
  misc_feature (1094)..(1094): n is a, c, g or t
  misc_feature (1136)..(1136): n is a, c, g or t
  misc_feature (4336)..(4336): n is a, c, g or t
ttttgacgatgaggatggatgggatgctgacagagacatggctttctggaagaggaaggatgagggcctcgtgggctaattaacgggatttgaggaaagtctctgggaatcagtagcgaacmtgttgaccaaattgtatgstcaaccaggcaataaatggttcttcactttattgcctgttaatgagaaggattggagaggtggtcgcaggccgaktaccgggaagtaggttcaaagacagctgcccgaatggtgccctggttgttgctaactcttctgctggwgwgggacgtctttatcaatctggagttaccctcaggtccactccactgtaacaaccagtactaagattttgcctggatgggcagaaagttcttccctcttttagacaamaattgcagagatatgtaaccactgtgggcagaaaccaggtgaatcwttagaactttgactggttcacttgggggwtgaggnwgtgaggcacgtaacgcttgttaaggaagaatggcaacagctgggccatcttacggctcagcccctcctkcagtctatcatkccaaccttagatcctggctgccaataaganagttnagggactctcwgagagatttccttgagasaamcaaactcccatgggaaaccatagatgaggcattgantagtattcgggctcttactgncctggatttggtttacagtgctgacgaaggtgatccactggagaatgagaaaccgacccaaagaaacctagataaattcttgcaccagnctgctgccctggaaaactcccctaactcttatgttgaaannaggcgagaacntaagagatgttatggcgatgaggcagcagatgccctggattaaagttgaattntnaaggcaantcgctgntgtgtaagtnaaggccaagtcagctaggggacgcaagcccawkagccccagctagaaaacaatgtctggctatggctgctgagtcaaggggtcctcaaagctgaaataaatggtgtcagtaatsaggaccttgctactcaatatagagctttaggtggaccaaaaacattggaagtttatttggttgagccatgagcagccgntakgccgctcaaaactgaaagtaaatgcaaagccttgcttantggcacagagctgctctctccctacatgctgcctgctcccctcccagncaccctaatttcagctgctttaaggaaaaaaataattagaaacgggactaaagtttccccgtctaagggggatcgaagtccatacacacccatctgagtatgctggggaanttkngggaggggaggaactcaaacttttatggctttgttggatacgggcgcccaagtcaccatcctacctgmactcctgtggaaggaaaaggcgcccggattcaggtaatagggtttgagcaaggtttgcagtagggaaaggaaantaatgtgaccttctgggtggancctctaggccaattcaatgtactgtgntgctgcttccacatctgaatatatagtaggaattgatgtttatatgcttgtacttccctgtctcataagtgtcagaggaaatctcctawtcgggaacagccacatgtagagaagtgctagtgggacacwtwmatttatctgtcaccaggcttcctatcscccmctgkkcggtccaacasagacagtatagaatcccwggaagaagaaagggaatctgtgccctgagtaaatactaatacctataggcggcagaggtagtaagagatmcagkatctcwacasaacagccttgtatgsccagtgmaaaagwctaacmggagcwggaggctkacagtggawtgttwccmawtggattcagttkttkctcccgtggccccagctgctscagacatcgtgactstakctgaatccactacacggamtwatggmacwtggtgcgctgttttgaacattgmcaacgmcttmtttsccataccagaggcatctgaggatcaakagmwgttcgcgtccatgtggcaaggcctcwaacacgtgtttgtwgtmctcckccagkgwtacctaaactcccctgccatttgccacmagtggatgggtcaggatttagcgcgagtkcctctaccctctgatgtccaaagctttcactatatagatkacgtcctgttggttggcaagtcagaagcctccgtmtcaacagccctgactgcggtgttatcacacttctacananagaatggctgataaactccaaaaacattcagggacctgcttgccaagtaaagtttcttggaantatgtaggcagattcacaktgcntaatccctccggcagtcaagaaaaagctgtctcttcaggcccccgscaccaaagaggagcaccttacttgactctttggntattggagacggtttgtgcctcgcttgggcattctacttggtcctttatattagctancctacaaatcagtatcctttgagtngggcccgaaccaaaaggctgcgttggaanctgtccagnaagctgtgncacgctctctacctttggggcctcacaatcctaatgacacctttgagctacaaktmtctgtaactgatgattttgccaattggagcctctggcaaggggaggcaacctccacctggaggtaccccttggggttttggactcactttcctcctgataaggctaccagacacgccccttttgaaaagtagctattagcttgctactgagctcttgtcaaaactgaacacctkwcccacggaggccttgtgactctccagcctgatattcccactttggggtgggtcaacttagactcaatgactaataaggtgagaagggctcaacaagcctcgcttgtcaaatagaaatggctatattcaagaacgcagctngnctngccccagcggcatctnagctttacatgaaaaagtggcagctatccctttgggggaaactttatcccccactccgccgcccgaagcaaagccgctggctcaataggaccctcgattcacagaggttcncctaaatgctgggcctggttcactgatggtttggctaagctgaaacctaatggtgtccactgggctgcggcagctgttcagcctcagcgncagctmtgnaagactgaaaaccgacaaggtcgctcagctcaatggncagaattcaaagccattctcataacctggacaatactccccttgataaasnttgttatatttttactgacttacgactgttgccaatggcctagccgtttggtctgccacttggaagactacagactggcagattaaagacacccctctttggggccgtaaactatggaaacaaattgtggctnccgattagacaatctgggtcactcatgtagatgcccangtaagggcccgttttctgatgagaccaaatggaatcaagctgctgatcgagcctgcaccgcccagattgctacaawtgctgcctggatccatcatcctaccggacatggcaacacatccaccatcanagactgggcacaaagtaaaggaccgtatgtttctgatgcagaagctaccactgcatgccagacttgtgactcctgccaaaagttgacctgtttkttctgcggtgagagaggccacattgcatagggcattgcccctgtccacttctggcanattggctacatcgaacctttgaccncctcttagggctaccgatgntgcctcaccactattgacacatttttcagnttatggtgttgctgttccagtccaatcagccgactctagccacaccattgtggcccttgaaacgaanctgtgtnatgttttcagctttccagactatttgcagtctgacaatggtgcaccttttatcacaaaagccactcaacaatgggctgatagtcaaggtattcaatggaccttccacgctccctactatccacgagcatctggtattgttgagcgttggaatggccttctcataaactgactcaaaaagatttctgactctwtctccctcacctcctcctggtccacacaccttagtaggacaatttggtcactnaatatggctgtccccggaaagggtcatctccttttggccgcttcctgagtaatgatcagtacaaaaggagagtgcgggaggttatatagacttattttgaaaattcgggattccgcctgaccaatcctgggcatgatgtttctttctttcccctaatagcaaccccaggccagcctggttggtacatcttccaggtggcagcccggccaaaagggganctagggaattcaaacttaattctggttcagccacctgkattctcttgttggattgacatgattwtagatcatnaggataatgaccacttggttgagtatactgcttkccgagtccccstatagtggcccacatggncaaagtggggaccataatgagtctctgtangtttstataaaatgcctttgtccctcttncacctgattgttctgaataaaagatctgggtgcgagtaggaaatgactggaaaaaaggtgaagttatagntactggaatgggacawgccgattttntagcggtggagggaaagcaacaaccctgccacctgggaagggaanaccttagaccccgggaagtgcgggggaataaggggcattaakgntctctttgtcttttagatcmagcaccgccacctagcaaaacaatcatattgtctcctggagccaagcagcagctgcagctggcaatctgacctgctgctgggtttgtcatctccttccacatgccatgaaaacaggaaaactcatgtggatatggccggtcctgaactattctgctatgcctgatgccatcaatggcagcttcccaacatggatgtgtacaaacacacgawccagcacaacwttgtttcaatctgactgatacaaatttatatgcttctcctgatgtctgaacagccttgggttataccatgtatggctacwgaggctgcaaatactcagtgacactgcccatgtggcttaaccaaascgatgtaatgagatcaagtttgacaacaaatcccgaattggtaacctttcggattntatgtttatatgtgggggagagtgggccatggaatgtctctccattggkgatgggggttgctttttggcccatctattgctccctgtaattattggcaatgacaccaaagattatcaggtcagtctaaactctcttntgtgggtcgtaatggataatagactggccttagacaacattctggctgtctaaaataagacctantggtcccgttcatgggatttgttcagctgattgagtccgggaccctgnggggcatggttgaggtyaatactgcaggttggcctcatcctgctgcttggatgtcctgttgatagtagccttaattaaatgctntatgagacaaattgaacagatttggtcccagcctctgtcagtcagattaatcagaatggctgatagagtggcgtactcatgkgaaaatttaccagaagccaagatggtgtaggamcgaggggtggatat

SEQ ID NO: 44 - DNA, 7392 bp, Homo sapiens
  repeat_region (1)..(7392): hervr
tgggggctcgtccgggatttgagaggcggccagaggacaccggccccttttccttttcggcagaaaccgcgcggccccggccaccggtggcggacggacgacgggacgactcttgtgtgtagtcaggtactttatttttgttctgtctttaatctctgaggtcggccaaccttcgtaggagtgtagagggaggacagacgtgtcctggaccctcacactccgaccccgggggacgccccggcggtcgtctggaggaaggctgatgacaccgtcagcctcctcaaatctgaaggcaggttccccctgccatctgaatcacttgtagtactttggcgccattctctggccgcgcggctcatctgtttttgtctggtttgtgttgttactgttgtcttatttatatgtgtgtatgagcctaaggacgggacaatgggacagacgctaacaactcctctatctttgactttgacgcacttttcagacgtccgggccagagcccacaatctttccgtaggagtccgaaaaggacgatggcaaactttctgctcgtccgagtggcccacccttcatgtcgggtggccccgggacggaacttttgacctctccgttattttgcaggttaagacaaaggtaatggatcctgggccgcatggtcacccggaccaagtggcctacatcatcacctgggaggatctcgtccgaaatcctccgccttgggtgaaaccctttctccataccccttctacatccaagtccaccctccttgccctagaagtcccaaagaaccggaccctggatccgcctaaacccgtactcccggatgagtcgcagcaagacctcctcttccaagaccctctacctcatccaccacataatcccctcctggaacccccaccctacaactcaccctcgccccctgtcttgtcccccgtttctcctaccaccccttctgcccccactccttcctctcttgtctcctcgtcgaccccgccttcctctccagccccacctgaactcacccccaggaccccgccacaaaccccccgtctccgcctccggcgggccgaaggtcaggatggcccttccacctggcaatcttccctttttccccttcgcacggtcaaccgcacgatccagtactggcccttttctgcctcggacctctataattggaaaacccataacccctccttttcccaagacccccaggccttgacctcgttgatagaatcaattctcctcacccaccagcctacctgggatgattgtcaacagcttttgcaggtccttctaaccaccgaagaaaggcagcgagtcctcctggaagcccggaaaaatgtgccggggcctggaggccttccaacccagctccccaatgaaatagacgagggatttcccctcacccgcccggactgggattatgagacagcaccgggtagggagagtctccgaatctatcgccaggctctgttggcgggtctcaagggggcaggaaaacgccccaccaatttggccaaggtaaggactataactcagggaaaagatgaaagcccggcagcctttatggaaagacttctggaagggtttcgaatgtatactccatttgatccagaagcaccagaacacaaggctaccgtggccatgtcgttcatagatcaggcagcactagacataaaaggaaaactccaaaggctagacgggatccaaactcatgggctgcaggaattagtaagggaggcagaaaaggtatacaataaaagggaaaccccagaagaaagagaagctaggcttataaaagaacaggaagaacgggaagatcggagagacagaaaaagagataagcatttaaccaaaatcctggcagccgtagtgactgaaaaaagggcaggaaagtcaggggaaacaagaaggcggcctaaagtagataaggaccagtgcgcctactgcaaagagcgagggcattggatcaaggactgccccaagcgtcctagagaccagaagaaacccgcccctgtcctcaccttaggtgaggacagcgaataggggtgtcagggctctggagccccccccgagccccggctaactctatctgtaggggggcatcccaccaccttcttggtggacacaggcgcccaacactcggttttgaccaaggcaaacggacccctgtcctctcgtacatcttgggtccagggggcaacaggaagaaagatgcacaaatggactaaccgccggacagttaacctagggcaaggaatggtgacacactccttcttggtggtacctgaatgtccgtacccccttctggggcgagatctcctaaccaaactcggagctcagatccacttctccgaggcaggggcccaggtgttagaccgagatggccaacccatccaaattttgactgtgtctctgcaagatgaacaccggctttttgacatcccggtcaccaccagcctccctgatgtctggttacaagattttccccaagcttgggcggaaacgggaggacttgggcgggccaagtgtcaagccccaatcataattgatctaaagcccacagcggtgcctgtatctatcaaacaataccccatgagcctagaagctcatatgggcattcggcaacacattatcaaatttctagaacttggagttttgcgaccttgtcgctcaccctggaatactcctcttctgccagtaaaaaagcctggtacccaggattacaggcccgtccaagatttgagagaaattaataaaagaactgtggatatccaccctacggtccccaatccttacaacttgctcagtaccttaaaaccagactacagctggtataccgtactggacttaaaagatgccttcttttgtttacccctggccccccaaagccaggaactatttgcctttgagtggaaggaccctgagagaggaatctcaggccaattgacctggactcgacttccccaggggttcaaaaactctcccactctcttcgatgaggctctccacagggacctcaccgacttccggacccagcatccagaagtgaccctgctccagtatgtagatgacctcctcttggcggcccccacaaagaaagcctgcacgcaaggtactaggcatctactccaggaactaggtgagaaaggataccgggcatctgccaagaaggcacaaatttgtcagaccaaggtaacttacctggggtacatactgagtgagggaaaaaggtggctcacccctgggcgcatagagactgtggctcgcattccaccgccccggaatcccagagaggtgcgtgaattcctgggaactgctgggttctgtcgcttgtggatacccggttttgctgaattggccgcccccctttacgcactcaccaaggaaagcacccctttcacctggcagacagagcatcaattggcttttgaggcactaaaaaaggcactcttgtctgccccagcccttgggttaccggacacctcaaagccctttaccctcttcctggacgaaaggcaagggattgccaaaggagtcctgacccaaaaattggggccttggaaaagaccggtagcatacctgtccaagaagctggaccctgtggcggccggctggcccccatgtcttcgtatcatggcagccaccgctatgctggtcaaagactctgctaagttaacccttgggcagccactgactgttattactccacatactctagaggccatagtgcggcagcccccggaccggtggataaccaacgcacgcctaacccactaccaggccctcttactggacacggaccgcgtccagtttggccctccggtcaccctaaaccctgctacgctgctgccggtaccagaaaaccaaccaagcccacacgattgtcggcaagtactggctgagacccatggaacacgagaagaccttaaagaccaagagctcccagacgcggatcacacctggtacacagacggcagcagttaccttgactcaggtactcggagggcgggagcagcggtagtagacggacacaataccatttgggcacaatcactacctcctggcacgtctgcacagaaggctgagttaatagcactaaccaaggccctagagctgtccaagggaaagaaagctaacatttatactgatagccgatatgcctttgcaacggctcatactcatggaagtatctatgaaagaagaggtctcctaacctcagaaggaaaggaaatcaagaacaaagctgaaataattgccttattaaaggccctttttcttcctcaagaagtggctataattcactgccccgggcatcagaaaggacaggatccagtcgcagtaggaaacagacaggctgaccgagtggccaggcaagccgccatggcggaagtactgaccctagccacagaacctgacaacaccagccacataactattgaacatacttatacctccgaagaccaggaagaagcaagagccataggggctacagaaaacaaagacactagaaactgggaaaaagaagggaaaatagtccttccccaaaaggaagccctggcaatgatccagcagatgcatgcctggacacacttgggtaatcgaaagctaaaattgttaattgaaaaaactgactttctaatcccaagggcaagtacactcatagagcaagtgacatctgcctgtaaggtctgtcagcaggtaaacgctggggctacccgagtgccagcagggaaacggactcgtggtaaccgcccgggagtctattgggaaatagacttcactgaagtaaaacctcactatgctgggtataagtacttactagtgtttgtagataccttttcaggatgggtagaagcctttcccacccggcaagaaacggcacacatagtagccaagaagatcctagaagaaatctttcctagatttggacttcccaaggtaattgggtcagacaacgggccggccttcgtttcccaggtaagtcaggggctagccaggatactggggattaattggaaattgcattgtgcttatagaccccagagctcaggacaggtagagagaatgaatagaacaataaaagagacccttactaaattgaccttagagactggcttaaaagattggagacgcctcctatctctagctctattaagagcccggaatacgcctaaccgctttgggctcactccatatgaaatcctctatggaggacctccccctttgtcaaccttacttaactccttttctccctccaattctaagactgacctacaggcccggctaaaaggactacaagcagtacaggcccaaatctgggcccccttggcagaactgtaccggccaggacattcgcagaccagccaccccttccaggtgggggactccgtctacgttagacgacaccgttctcagggactggagcctcggtggaaaggaccctacattgttctcctgaccacacccacagccataaaggttgacggaatcgccacgtggattcacgcatcccacgccaaggctgctccagggacgcctggaccgacgtcgtccggaacttggagactccgccgctccgaggacccccttaagataagactctcacgcacttgacttcttacttgcccttgtcctcctaccccgcgccgtacatagcagtaacccctcatatagtccaagatgggattcacaacaaagataatcttcttatacaacctagtactggtctacgcggggtttgacgaccctcgcaaagccatagaactagtacaaaagcgatatggccgaccatgcgattgcagcggaggacaagtgtccgagcccccgtcagacagggtcagtcaagtgacttgctcaggcaagacagcttacttaatgcccgaccaaagatggaaatgtaagtcaattccaaaagacacctccccaagcgggccactccaagagtgcccctgtaattcttaccagtcctcagtacacagttcttgttatacctcataccaacaatgcagatcaggcaataagacatattatacggctactctgctaaaaacacaaactgggggcaccagtgatgtacaagtattaggatccaccaacaaacttatacaatctccctgtaatggcataaaagggcagtctatttgctggagcactacagctcctatccacgtctctgatggaggaggtccattagacaccacaagaattaaaagtgttcagagaaaactggaagaaattcataaagccctatatcctgaacttcagtatcaccctttggccatacctaaggttagagataacctcatggtcgatgcccagactttaaacattctcaatgccacttacaacttactcctaatgtccaacacgagcctagtggacgactgttggctttgtttaaaattaggtccccctactcccctcgcaatacctaacttcctattatcctacgtgactcgctcctcggataatatctcttgtttaataattcccccccttctagttcaaccgatgcagttttccaattcatcttgcctcttttccccctcctacaacagtacagaagaaatagatctaggccatgttgccttcagcaactgtacctccataaccaatgtcaccggtcccatatgcgctgtaaatggttcggtctttctctgtggcaataacatggcatacacttatctacccacgaactggacggggctttgcgtcctagcaactctcctccccgacattgacatcattcccggagatgaaccggtccccatccctgctattgatcattttatatatagacctaaacgggccatacagtttattcctttactagcagggctagggatcaccgcagccttcacaacaggagctacaggcctaggtgtctctgtgacccaatatacaaaattatctaatcagctaatttctgatgtacaaatcttatctagcaccatacaagatctgcaagatcaagtagactcattagccgaagtggttctccagaacagaagggggctagatctacttacagcagaacaaggaggaatctgtttagccctgcaagaaaaatgctgcttttatgttaacaagtcagggattgtgagagacaaaataaaaaccttacaagaagaactagaaagacgtagaaaagatctagcttccaacccactttggactgggcttcaagggctcctcccttacctcctgccctttcttggccctctacttaccctcctgctcttactcaccattgggccgtgcatttttaaccgtctaaccgcttttattaatgataagttaaacataatacacgctatggtgctaacccaacagtatcaggtgctcagaaccgatgaagaagctcaagattgagcctctaagacacaagaaaag

SEQ ID NO: 45 - DNA, 6069 bp, Homo sapiens
  repeat_region (1)..(6069): hervs71
ggatccaaaatagccaccctgcagacggccttgctcaccttttctgtcatcccataacttttccagtgcccttaaataacacactatgtacacaaacctatgcctgtgctgctttactctgtctggacccttattctatccccctgtggctactctcctaccttaggaaagatctgagtggcccctttcctccttacccccatcccttaacccacacagctcgttttcctgtgtcacagcaagtccagcacctccaagacttggctctgctctccatcctaaaacccttaaaagaaagggctgagtttgaactttttgcctttgagtcggggagacaccaaagatatttggctataagtcaaaaaggaaggggggggtcacataggtcccactggcctcagacccacctcttgtcctctctctagatctcaaagcttaaagagacagatcttatgtggcaagaaatgttggctatagttgttttcctacttcttctggttataatacttctgttcttccaatactacagccccccaggccatgaatatctctgtctgtgctgggtttaatatttctgcttaaaccttgttaattgcctccagaatgggaaactcttcttcctggccccgtagagattacagccctctccaatgtatgttgcagaatttctctctgggttctcagaggattacggagtccaccttaagaaaggcaaactccagacactctgtgaagtagaatggccacagtttggaactgggtggcaccagaagggtcattaaacctcacaactgttcaggctgtgtggcgggtcatggctggaactcccggacaccctgatcagtttccttacattgatcaatggctagatttggtccagagccctcctccatggctccgctcacgtgccattcatgatcccacctccaaggtccttttgagctggaccacacttttgccccaaccctcacgtcggctcctcctgtacagtctccttctgaagaagaggaaagttctcttcacccatttctgcctccctataacctcctgcccaccccccccccccgccccagaatatttccttgtctcctcgactacatcccctgtggcctctccacctatagccacccaattacggcatcggctggagaggtggccctccttctcccactgacagaggcccaaatcctctgggcaatgaggctctgctccatttttagtttatgtccccttctctgtttctgacctgtacaactggaaggctcataatcccccccttttctgaaaagccccaggtcttgacctcactgatggagtccgtgctccggaatcaccggcccacctgggatgactgtcagcaacttcttttaacccttttcacctctgaagagagggaccatatccgaagaaaggtcagaaagtatttcctcacatcagctggtagaccagaggaggaagcccgggacctccttgaggagacttttccctctacctggcctgattgggatacaaaatcctcgggtgggaagagagctttggataattttcactggtatgtccttgtgggtatcaagggagccactcaaaaacccatgaatctgtccaagacaactgaagctgtccaggggcctaatgagtcaccaggagtgtttctagaacgcctcctggaggcctatcagatttacaccccttttgacccggaggctcccgagaatagccgtgctattaatttggcatttgtgactcaggtagcccctgatattataagaaaattacaaaagctggaaggatttgctggaatgaacagcagccaacttttcaaatagcccagaaagtttttgacaattgagagtttgaaaggcaaaaacaggtagctcaggcagctgaaaaggctgctgacaaagcatcaaaaagacaggcaaagatcttagtggctgccatccaaggaagcaagaaggcagggcccccatcacagagcaccagccaggggaccccaggtccccaccagaaaggccaaaaaggtgagcaggctcccctacaaagaaaccaatgtgcttattgcaaacaaattggacacaggaaaaaagaatgctcattaaaaccagaggaaaaacaagagaagaaaaaggtcctcaccctccctgctgtggatgaatctgaagattgacagggccggggctgccacttccttcacccccaggagcccttggtgactgccacagtgggggcccagcctgtatgcttcctaatcgacactggggcggaagacttggtactgcaaacacccttgggcagtgtctctaataaaaaggtggctgtgcaagggacttcataagcttcataagctgcaggcatccatctccttctcagcccaataagctcacctcacattaggggacccaacaccctctaccacccagctcctgctaaccacccctttgtcagaggaatatctcttagtttcaccctcacaaccgctggagaataaaactaatcctctcctactggatttacagactctctttcctcaagtctgggccaagtcaaacccccccaggactggcaaagcaccatctgccagtagttgtagaactcctggccactgccctgccagtccaggtaaaacaatatcctatgagtcagtgggctagagagggaatcaatccccatattcagtctgcctggaatactccatttttgctggtccagaaacctggaacaaatgattaccggcctgtacaggacttgcaggaagttaacaagtggacagtcactgtccatccaactgtccctaacccttatattttactcggcctgcttccaccagaacatacagcatacactgttcttgacttaaaggatgctttctttgctattcctctggcccctaaaagccaacctatatttgcttctgaatggatggaccctggctcaggagacaccactcaattaacctggacttggttaccccagggtttaaaaaattcccccaccctttttggggaagccctccaacaagatcttataccgttctgagccagtcaccctaactgcacgcttctccagtacatagacgacctgtttttggctactgaaaccactgacagctgcctgcaacatactagggacctactttacctccttcaggaactcgggtattgggtctcagccaagaaggcccagctttgtcttcccagacttttctacctaggatacaagataaacaagggagaaagggcacttgccactgctcgaaaggaagccatcctgcaaatccccactcccaccactaggagatgggtacatgaattcttaggggctgtgggatactgtcgtttatggatattggggttcgcagaaatcaccaagcccctgtacaccactaccagagggaatggcccacatgtttggactgacaaagaacaggcttttcaaaatctaaagaaggcattaactgaggtccctgctcttgccctcccaaatatctcagaaccatttcatctttttgttcatgaaagccagggagtcactaaaggggtactcactcaaactttaggaccatggtgatgcccggtggcctatttgtctaagatactggaccctgtggctccgggtgaccaagttgtctgtgagccatagcggcaaaagcaagcctggtccaggaggctgataaactgactctgggccagaatttaacccttatggctcctcatgccatagagactttgctacaaaggcgctctggcaaatggatgtcgaatgctcacatcctgcagtatcagagtttactgttagatcagccttggttaactttctctcccacaaggtgtttaaatccagctacctttctccctgatccagaccttaccacacctgtccatgactgccaagaactgttagagactacataaactggccgacctgatctccaagatgtgcctctaaaggaggtggactccactctgtttactgacagcagcagcttccttgaacagggagtaggaaaggctggtgcagccgttactatggagacagatgtactgtgggcccaggcactgccggcaggtacctcagcacagaaggctgaattggtcaccttcactcaggctctctgatggggtaaggacaaacgtattaacatctacactgacagcaggtatgtttttcctactgtacatgtacacaaagccatctatcaagagtgagggctactcaccaggaaagactattaaaaacaaagaagaaattttggccctgcttgaagctgtttggcttcctccgcaggtggctgtaattcactgcaaatgtcatcaaacagaaggcatggctattgcctgtggtaaccaaaaagcaggctctgcagctcgagaggcagcttggctcccagtcacgcctttgaccctgctgcccactgtgtcctttccgcaacctgacctaccagaccacccacaatactccccagaggaagaaaaacaagcttcagatctttgggccagtaaatatcaggaaggtttggtggattcttcctgattccagaatctttattgccccaagtcccctgggaaactttaatcaatcatctgcattctgccacccatttgggaggaataaaactggcccagcttcttaggagccatttcaacatcccccaccttcaggacttaactaaccaagcagctctctggtgtatggattgtgctcaggtaaacaccaaacaaggtcctaagcccagctcagtccaccctccagggaggctctccccgagaaaggtgggaagttgactttacagaaataaaaccacactgggcagggtataaatacctcctagtgctaatagacaccttttcgggatggactaaggcatttaccactggaaacgaaactgccaccatggtagttaggcttttactcattaaaatcatctctcaacatgggctgcctgttgccatagggtctgataatggaccagccttcacctcgtccatggctcagtcagtcagcaaggcattaaacattaaatggaaactccattgcacctattgaccccagagctctggacaggtagaacgcatgaaccacacaataaaaagtactcttactaagttaatcctagagaccagtgagaattgggtaaagctccttcctttagcccttcttagagtaagatacaccacttactgggctgggttttcaccttttgaaatcatgtatggaagggctcctctatcttgcctaagctaagggataccaatttagcagaaatctcacaagctaatttgttcagtacctgcagtctctccaacaggtatgagacaccatccagccacttgtccagggagcacactccaatccagttcctgaccagactggccctgccactttttccagccaggtgacttagtataggttaaaaagttccagaaggaaggattcactcctgcctgaaaaggacctcatactgtcatcctcaccacgccgatggctctgaaagtggatggcattccttcttggattcatcactgtcacatcaaaaaggcgaacaaagcccagcaagaaacatggatccccaagcctgggccatgccccttaaaactgcgcataagtcaagtgaagccatcggattaatcatttttatttacctcttttgtttgtttccgcctattacgccctctgcccctctctactcttttctcctcacttctttcacgacagtatgtgtgtttgcaaacaccacctggaaggcaggaacctccaaggaagtctcttttgcagtcgatttatgtgctttgttcccagagcctgcccaaacccatgaaaaacaacccaacctgccggttatgggagcaggaaatgtcaacctcgctgcagggtccagacacacaggaagccggactagatgtggaagctctaaaggtgcagaaaaaggactccagagcgttgacttttacctctgtcctggaaatcaccctgactctagttgtctagattcttatcagtttttctgccctcactggtcatgtgtaaccctggccacataccctggaggattgacctggtcctcaacacttt

SEQ ID NO: 46 - DNA, 319 bp, Homo sapiens
  repeat_region (1)..(319): hir
  ref <308>: DATABASE ACCESSION NUMBER: Database of repetitive elements (repbase)
  ref <309>: DATABASE ENTRY DATE: 1996-01-26
gattcccaggtgcacagagatcctaatccgcatccatcgaaatctcacaaagtgtccataaatcactcagggagggcccccatggatacagggccgtagtaggatgctcctatagtgggcattaatatgagaatgaccgaaaagtgcatttaggaccatattataattttcgggttcccaggtgcacgtttccaataaccaggtgcacggatgtatagggtcccccccatggatagaggtccgtgttagggtgctccatatcgggcatgaatatcaggaacaccggcatgtgcacttaggaccatgttttaatttttca

SEQ ID NO: 47 - DNA, 1158 bp, Homo sapiens
  repeat_region (1)..(1158): hres1
ggctcgctggggataatatcgcagctgaaaccgaacatcaagctggcttttcaaaccttcagttatttacattagactgagaggggaaaagcgctaagagtgcaagagcagagaaagagcaagaggaaacttgaaaaggcggatcacgcaatgcgctgtgcacacgcccccgccccgcgcacccgctaccccacccgagcccccagcggcccgcgtcccccatcccggtcccaagcccagacacctccgagatccgtcccgcggctccggccgcgccaccgccaccctcaagacccccgcagcccaggcccggccccgcgccaccgacgccccccgcggcccgacccgcgcgccccgccagcccgggcctcgtaccgtaggtttcggacatggccgtctgcgacatcttgggagcggcgccgcctctcgccgggtcaccgtgcactcgcccgcggtccgccggcgcgtctcggtggggaaggacctggggcgggggaccggaggagggaggggcccgaccggtccccacggcaaccgccggtcctcccagcggctgcggcccagccggactccagctccgcgcaggcgccagggccctccaccctccgtccggccgcgaccgcgaggaggaagaggagatgggctacgcgaggcccggcccaccccgcgttcgcgcgtgcgcacggggaggccggggcggggcgcgtgaggacttcggcgcgcgccggaagcacgtgcgcgggctgggcgctctggcggtgtgcgctgaggtgggcagagcggcaggtgggggcgttgggggctgagtcccgatttccctgagggagggtcgggtagaggcgggcggtgggcaggtttgggggtgacagagggctggggacagtggggtccagttgccggacagaggaggaaggtgcccgcactggggaggaaagcagtccatttgccaaattggcccgtctcagttaagacgttgtcttcggtcatcatctgcggctgtcagccaggaaaaaacttccctgacgctgttacgatggaggccagaacttggttaatgtgtaacaaggaggcagtaggccccaggtgtccagccagaggccgccctgtgaatgggaggcaggttcatttacccgttggacccgttgggaagctaagctt

SEQ ID NO: 48 - DNA, 631 bp, Homo sapiens
  repeat_region (1)..(631): hsati
  misc_feature (3)..(3): n is a, c, g or t
  misc_feature (6)..(6): n is a, c, g or t
  misc_feature (11)..(12): n is a, c, g or t
  misc_feature (45)..(45): n is a, c, g or t
  misc_feature (50)..(50): n is a, c, g or t
  misc_feature (57)..(58): n is a, c, g or t
  misc_feature (65)..(65): n is a, c, g or t
  misc_feature (119)..(120): n is a, c, g or t
  misc_feature (122)..(122): n is a, c, g or t
  misc_feature (133)..(133): n is a, c, g or t
  misc_feature (136)..(136): n is a, c, g or t
  misc_feature (147)..(147): n is a, c, g or t
  misc_feature (171)..(172): n is a, c, g or t
  misc_feature (223)..(223): n is a, c, g or t
  misc_feature (263)..(264): n is a, c, g or t
  misc_feature (309)..(310): n is a, c, g or t
  misc_feature (314)..(315): n is a, c, g or t
  misc_feature (318)..(319): n is a, c, g or t
  misc_feature (327)..(328): n is a, c, g or t
  misc_feature (333)..(333): n is a, c, g or t
  misc_feature (335)..(335): n is a, c, g or t
  misc_feature (344)..(344): n is a, c, g or t
  misc_feature (360)..(360): n is a, c, g or t
  misc_feature (376)..(376): n is a, c, g or t
  misc_feature (560)..(560): n is a, c, g or t
  misc_feature (586)..(586): n is a, c, g or t
gantcngctcnngacacaactctctgagccttcggtgacctttcngtctngtgtaanngcactcntgtcyycctggcagcagttggacctcgcgatgtggattgtgccctcacccagcnntntttatgccctntcnccatggtgacnggattaggggtctcctgctcttcnntcctaaggaccactgtctgtgctgtgtctttcaaaggtcagaagagattgnacctttgtgtttttattttccctgtgtttgctttttctcnntggggaacctgtgttgctgctttgaaggtatattcatactggccnntcanntgnncaacatcnncaaantnactagttanggctttcaaaatatgntatttcaaaaaattanccgtctgtattttccatatgcagttataagtaggtttcatcggttatgttttattcctcagtttatacatttgattattgtaccaagcagagtacctttgaaattttttttcatttaaaaaatatggatctttaaaaaaaaattatatatgatatatattacatgttatgtgctatgccttatntgtaacatataacctcatatattttntatgtcatagtatataatatttatcctgtgtcatcttatatatac

SEQ ID NO: 49 - DNA, 59 bp, Homo sapiens
  repeat_region (1)..(59): hsatii
  misc_feature (2)..(2): n is a, c, g or t
antccattcgggtccattcgatgatgatcacactggatttcattccataattctattcg

SEQ ID NO: 50 - DNA, 1287 bp, Homo sapiens
  repeat_region (1)..(1287): hsmar1
ttaggttggtgcaaaagtaattgcggtttttgcattgttggaatttgccgtttgatattggaatacattcttaaataaatgtggttatgttatacatcattttaatgcgcatttctcgctttacgtttttttgctaatgacttattacttgctgtttattttatgtttattttagactatggaaatgatgttagacaaaaagcaaattcgagcgattttcttattcgagttcaaaatgggtcgtaaagcggcggagacaactcgcaacatcaacaacgcatttggcccaggaactgctaacgaacgtacagtgcagtggtggttcaagaagttttgcaaaggagacgagagccttgaagatgaggagcgtagtggccggccatcggaagttgacaacgaccaattgagagcaatcatcgaagctgatcctcttacaactacgcgagaagttgccgaagaactcaacgtcgaccattctacggtcgttcggcatttgaagcaaattggaaaggtgaaaaagctcgataagtgggtgcctcatgagctgagcgaaaatcaaaaaaatcgtcgttttgaagtgtcgtcttctcttattctacgcaacaacaacgaaccatttctcgatcggattgtgacgtgcgacgaaaagtggattttatacgacaaccggcgacgaccagctcagtggttggaccgagaagaagctccaaagcacttcccaaagccaaacttgcaccaaaaaaaggtcatggtcactgtttggtggtctgctgccggtctgatccactacagctttctgaatcccggcgaaaccattacatctgagaagtatgctcagcaaatcgatgagatgcaccgaaaactgcaacgcctgcagccggcattggtcaacagaaagggcccaattcttctccacgacaacgcccgaccgcacgtcgcacaaccaacgcttcaaaagttgaacgaattgggctacgaagttttgcctcatccgccatattcacctgacctctcgccaaccgactaccacttcttcaagcatctcgacaactttttgcagggaaaacgcttccacaaccagcaggatgcagaaaatgctttccaagagttcgtcgaatcccgaagcacggatttttacgctacaggaataaacaaacttatttctcgttggcaaaaatgtgttgattgtaatggttcctattttgattaataaagatgtgtttgagcctagttataatgatttaaaattcacggtccaaaaccgcaattacttttgcaccaacctaa

SEQ ID NO: 51 - DNA, 1301 bp, Homo sapiens
  repeat_region (1)..(1301): hsmar2
cgaggggtcttcaaaaagttcatggaaaatgcgtattatgaaaaaactatgcatggatttcaaaaattttttgcaccaaaataaactcgtactaacttgttataacatgtctgaacaggatctagtttgaggcactaagaaggataagacatcagtttgaaaagagcccctatcagagcaacatgaattctgctaaaattgaagcaagaacaaacatcaaatttatggtgaagcttgggtggaagaatggtgaaatcactgatgctttacgaaaagtttatggggacaatgccccaaagaaatcagcagtttacaaatggataactcgttttaagaagggacgagacgatgttgaagatgaagcccgcagcggcagaccatccacatcaatttgtgaggaaaaaattaatcttgttcgtgccctaattgaagaggaccgacgattaacagcagaaacaatagccaacaccacggacatctcaattggttcagcttacacaattctgactgaaaaattaaagttgagcaaactttccactcgatgggtgccaaaaccgttgcgcccagatcagctgcagacaagagcagagctttcaatggaaattttaaacaagtgggatcaagatcctgaagcatttcttcgaagaattgtaacaggagatgaaacgtggctttaccagtacgatcctgaagacaaagcacaatcaaagcaatggctaccaagaggtggaagtggtccagtcaaagcaaaagcggactggtcaagagcaaaggtcatggcaacagttttttgggatgctcaaggcattttgcttgttgactttctggagggccaaagaacgataacatctgcttattatgagagtgttttgagaaagttagccaaagctttagcagaaaaacgcccgggaaagcttcaccagagagtccttctccaccacgacaatgctcctgctcattcctctcatcaaacaagggcaattttgcgagagtttcgatgggaaatcattaggcatccaccttacagtcctgatttggctccttctgacttctttttgtttcctaatcttaaaaaatctttaaagggcacccatttttcttcagttaataatgtaaaaaagactgcattgacatggttaaattcccaggaccctcagttctttagggatggactaaatggctggtatcatcgcttacaaaagtgtcttgaacttgatggagcttatgttgagaaataaagtttatatttttaatttttatcttttaattccattttccacgaactttttgaagtcccctcg

SEQ ID NO: 52 - DNA, 842 bp, Homo sapiens
  repeat_region (1)..(842): huers-p1
  misc_feature (326)..(326): n is a, c, g or t
aatttgggggctcgtccgggattgcccttgtggctacctgcccgtggtttggtagcccccctctggcgatggatccagaggccagcccaagtggccgcctagttctcttggactgggggctgactctggtactatctctctaccggtggggcgctgccgacccaatgtgcatggatttaattgcaatrgagaaatagtcctggggagacatcccataactgtagccctatcacagggtgtctgtctgtagccccattgcagggtgtctgtctgtagccccattgcggggtgtctgggttggtgagtattctaggcgctgccaacgnccccttccttctcctgactkgttctgtagccccctggtggggtgtctgttggtagccycacggggtgtctgtctgtagccccatcatggggtgtctgtctcagtttagctcctatggggtctcwgttggctctccctaactagtaggaagagtctgtggttrgggagacttctcctcaatcaggaagatttcagggagatttctcagacggagaataggagaatagtttggaagggatactcttggatttgagacttggtctgggatctgtgttttgaaggccttctgttcgtcttatctttgtgtgtgtttgtatatgtggaggggatctctgaaggaattgctgatggaagtccagcaggcctaactcagagaaccctccttatttgtctggtcacatttggtgagccctaaagaaagctcaacaggcctgtctyggggtgactatctgctcttcgccttgcccagagaccccactgtgaattaccatttggaggtcatccctccccacctgga

SEQ ID NO: 53 - DNA, 3088 bp, Homo sapiens
  repeat_region (1)..(3088): huers-p2
  misc_feature (96)..(96): n is a, c, g or t
  misc_feature (110)..(110): n is a, c, g or t
  misc_feature (242)..(242): n is a, c, g or t
  misc_feature (296)..(296): n is a, c, g or t
  misc_feature (331)..(331): n is a, c, g or t
  misc_feature (423)..(423): n is a, c, g or t
  misc_feature (610)..(610): n is a, c, g or t
  misc_feature (623)..(623): n is a, c, g or t
  misc_feature (639)..(639): n is a, c, g or t
  misc_feature (684)..(684): n is a, c, g or t
  misc_feature (732)..(732): n is a, c, g or t
  misc_feature (781)..(781): n is a, c, g or t
  misc_feature (862)..(862): n is a, c, g or t
  misc_feature (890)..(890): n is a, c, g or t
  misc_feature (899)..(899): n is a, c, g or t
  misc_feature (961)..(961): n is a, c, g or t
  misc_feature (1113)..(1113): n is a, c, g or t
  misc_feature (1146)..(1146): n is a, c, g or t
  misc_feature (1186)..(1186): n is a, c, g or t
  misc_feature (1243)..(1244): n is a, c, g or t
  misc_feature (1252)..(1253): n is a, c, g or t
  misc_feature (1432)..(1432): n is a, c, g or t
  misc_feature (1536)..(1536): n is a, c, g or t
  misc_feature (1557)..(1557): n is a, c, g or t
  misc_feature (1755)..(1755): n is a, c, g or t
  misc_feature (1974)..(1974): n is a, c, g or t
  misc_feature (2003)..(2003): n is a, c, g or t
  misc_feature (2031)..(2031): n is a, c, g or t
  misc_feature (2077)..(2077): n is a, c, g or t
  misc_feature (2122)..(2122): n is a, c, g or t
  misc_feature (2151)..(2151): n is a, c, g or t
  misc_feature (2226)..(2226): n is a, c, g or t
  misc_feature (2310)..(2310): n is a, c, g or t
  misc_feature (2550)..(2550): n is a, c, g or t
  misc_feature (2579)..(2579): n is a, c, g or t
  misc_feature (2598)..(2598): n is a, c, g or t
  misc_feature (2632)..(2632): n is a, c, g or t
  misc_feature (2634)..(2634): n is a, c, g or t
  misc_feature (2680)..(2680): n is a, c, g or t
  misc_feature (2698)..(2698): n is a, c, g or t
  misc_feature (2725)..(2725): n is a, c, g or t
  misc_feature (2759)..(2759): n is a, c, g or t
  misc_feature (2807)..(2807): n is a, c, g or t
  misc_feature (2909)..(2909): n is a, c, g or t
  misc_feature (2643)..(2643): n is a, c, g or t
actgggggctcgtctggaatcagcagcagggtgatktacagatgwggaactgtcggatgtgcctcttttctaagaccctgccacctctctttcttntgggtaaaaggctntgtttcccttcacagaggtctcgctgkcacgcgggactggagcagagwcctggggcwactgaaggcatcwtttgctggaaggccccgasactgaactctgtcggccaggacccccagacttcgcttggtgtnttttctctctctcacagtttamaaatggctcttatctcctttataatgttaagngttttgctacaggctgcggcaatgttactaagtanaatgagcatttggctcagccatcaaaggtgcaaatcagaacaatgtggtttccattttttcttagaggtgccatscttgcccccaccctganagccacaggcgcgcacggcgcagggcacctcccctccttaccccctcccctcccggctcaggcgcctgggcgtgcccacggcatgcaaaagccgcgcccaacagccacgaagggtgggagaaaaccgaggctgccgctgggaccccacggggctggctggccggtgcctcctctcagccgcgccaanggaacctttcctnccctggccaaggaatncaaactagtctgaaccggggaaaggatacaataattaaagggacncatttgcactgagcaaggggttcttccccccgactmccccctttttgncctttaaactgtttttcttttttccttttctaagtgagagggttccctncccakcactctgcttctgatagggaagttaacagaggassagcgacccctgctggcggatagctgcaaattcggcagggcncatttgagacaatctaaacagatagatncagcccctnaaatatctttttagtcccaaacttgattccaagcttcaggttgaggccctagaaagaaaaancagatctgagggatccaaagccaggcaacaggcacaatgtaaatgggcaggaccaattcctgctgactaaacccccgccccatggaaggaggccatgctccttggcataaacgaggcccagggaactcaaaggttgtcgacagcagggaganagggaggcataggcgagggcggatcattcctwntctccgggccttccctgcttcatggatgaatgccacattngcacccatgggtggcacctgccaaggtcaccgggactcggggataaaaagtggaaanngaaaggannatgctcgctttctctccccatcacaccctgagttttcactgaaagaaggaagggaaatgagggacgcctctattccctgtctttcagaacgggcaaccagctctcttcaccacccccagcttatactcctctggagtgtatcctgaaccattgggactgctttgaccctcggaatctgnaggaaaaacgcctcatagccctctgcacaaaggtttggccaaattatgacttacaasaaggactagcttggccttaggaaggaaccgttcattttgataccatncggctgttggaccttttctgnaaacgtgaggacagatggtctgaggccccatatgtgcaggctttctataccttgcagggcaatccagacctttgccgacagtgtaggattgatccagccctcctgtttgccatctcaggagaggctgcaaggggcaatcccagggaactaaagawacgagtcccagaggcacccccagcagagaagccagctccctcnagccctgctcctccgggtccaccctgacctccctatccagcttcagcctctcacttgccccctcctagaaattctcaccctagacaagccccggtctcactcttgctcctccaacagatgcctggtgaatttggccccagtaaggtccaggtccccttctctctacaggacttaaagcaaattaagggggatcttggcaagttttcagatgaccctganagatatatagaggctttccagaatttcanccaaatatttgaactctcctggagaganagttatgttacttttgaatcagaccctgatggacactgagaagcangccgctctgcaagcagcagagagatttggggatgagctttgtatnacatatagcatcaggaaagggggcgaatnttatccaactggaagagaagcagtaccagtgaatgaccctggatgggatcccaatgatgagatgggagactggangaggagacactttcaggtgtgcataaggagggcttacgtaggactaggaccaaacmcctsaactataccmmgttatccatgatngaccaggaatttgatgaaaatctcattgccttcttggaaaggctaagagaggccttggtaaagcacacctctctatctcctgattcagtcgagggacaactaatcctaaaggataaatttattactcaggcagcccctgatatcaggaggaagttgcagaaacgggccctgggaccagatagtactttagaggacctcctgaaagtggccacctcggtcttttacaatagagacagaggnccaggaccttgagttcagtagacacaggnaagagacctgggaagcttnagtagccaccgtgtaagcccacaaaccccagaantnccaaggtgnacctgttaactgctaaagatatggcaagaatagttanctccttctaaagtttatntgctctcgtacaagstttaatttcttncaccagggstgacccaamasctcagggtacaatnttgctgttagtatatttcacttcttatttctgtaatctttggcactanattctttccttgtataatacacgtttaacccatgcatacttaaccttatagaackkgttttttttttttctcacgcctagaggccatcaaactccaaatggncaggcaactgaagcctcggacaatgactcccctttgccaggaacccttagatagacctctgggagaaatttgactgccgttttccccaaaacaacgccccctgtcggcaggaagtagctaagaccggtcatcgtccatattctaatggcagttagatgtgcctcttcagagaggggaaa

SEQ ID NO: 54 - DNA, 8919 bp, Homo sapiens
  repeat_region (1)..(8919): huers-p3
  misc_feature (16)..(16): n is a, c, g or t
  misc_feature (159)..(159): n is a, c, g or t
  misc_feature (175)..(175): n is a, c, g or t
  misc_feature (429)..(429): n is a, c, g or t
  misc_feature (463)..(463): n is a, c, g or t
  misc_feature (722)..(722): n is a, c, g or t
  misc_feature (897)..(897): n is a, c, g or t
  misc_feature (1183)..(1183): n is a, c, g or t
  misc_feature (1412)..(1412): n is a, c, g or t
  misc_feature (1666)..(1666): n is a, c, g or t
  misc_feature (1678)..(1679): n is a, c, g or t
  misc_feature (1851)..(1851): n is a, c, g or t
  misc_feature (2231)..(2231): n is a, c, g or t
  misc_feature (2513)..(2513): n is a, c, g or t
  misc_feature (2640)..(2640): n is a, c, g or t
  misc_feature (3388)..(3388): n is a, c, g or t
  misc_feature (4479)..(4479): n is a, c, g or t
  misc_feature (4559)..(4559): n is a, c, g or t
  misc_feature (4684)..(4684): n is a, c, g or t
  misc_feature (4771)..(4771): n is a, c, g or t
  misc_feature (5753)..(5753): n is a, c, g or t
  misc_feature (6084)..(6084): n is a, c, g or t
  misc_feature (6104)..(6104): n is a, c, g or t
  misc_feature (6132)..(6132): n is a, c, g or t
  misc_feature (6279)..(6279): n is a, c, g or t
  misc_feature (6301)..(6301): n is a, c, g or t
  misc_feature (6331)..(6331): n is a, c, g or t
  misc_feature (6569)..(6569): n is a, c, g or t
  misc_feature (6992)..(6992): n is a, c, g or t
  misc_feature (7036)..(7036): n is a, c, g or t
  misc_feature (7153)..(7153): n is a, c, g or t
  misc_feature (7226)..(7226): n is a, c, g or t
  misc_feature (7245)..(7245): n is a, c, g or t
  misc_feature (7330)..(7330): n is a, c, g or t
  misc_feature (7422)..(7422): n is a, c, g or t
  misc_feature (7505)..(7505): n is a, c, g or t
  misc_feature (7562)..(7562): n is a, c, g or t
  misc_feature (7573)..(7573): n is a, c, g or t
  misc_feature (7638)..(7638): n is a, c, g or t
  misc_feature (7820)..(7820): n is a, c, g or t
  misc_feature (8003)..(8003): n is a, c, g or t
  misc_feature (8012)..(8012): n is a, c, g or t
  misc_feature (8051)..(8051): n is a, c, g or t
  misc_feature (8087)..(8087): n is a, c, g or t
  misc_feature (8120)..(8120): n is a, c, g or t
  misc_feature (8220)..(8220): n is a, c, g or t
ttttggggsattggcnaggataccaaggtacaacattcattgraacggtgagtataggagcgractccaactctgtcctttcattccgaggctctcttggcctccattttaaaatcaaatcaaatcaataacgggtatccgtcagccagttaaaaacgnttagcgcggctgccgntcttaaagactcggatgwcaggcttgctggggagaacatggagaatcccccagcacccacgggttgttgggaatgttggccatgtttgaaccagcttcctttcacggagrrcctagccgtcacgtggggctggaagaagtcctgaggcaactgaggatttctggccggggctacaccccggtgttatccaaaggcttctggaccgaccccagcctccgacagcccattggggtgttggcaacaggatctccaancttccttttgctatcgcaatttcctcctttcctntctcagtsaccatgtctcttatcctctctgtgtatgcaatgtgcgggaatttttacagttcagggaagtaatcctgttwgacaagatcagggaatgtcgtagtaaccagggatatagctcaagggaaggcgtctttgtgattttctaggaacagagggcccccacatccccagtgaacatctctctctgcccttggtctggagagcacatggmacttccaggtctctctctscccttggtctggagagcacatggcatntcaaggctactgcccttggtctggacagcacatggcatttcaaggtcaacagcgccacctagtggaataggaatcctctccatgaggcacattgtcggtccttcaccgaaacactctagcttcccaattctcccctctttttgcgcctctctactagaaatcaggcttcatgcyncttctgtgaacgggaaaaytctgctttcaacarytaggagtaaaatatcctccgwagccaaattttagtctcgatactgtcccatcagcaggaaaacggccattcggtccctacgttcttttaaggcacctattctgtctccaattaraatggtacttaattagtaaggggattttaagtycggaagttaaccggaaccatttttctctaagggtaaatgctttagcatgggccataatagcaggatatagagctcaatctagcacgctccctccgttaaaggggncttgcccaaatgcaactgttacatagtctctcccgagatccattttttagggagccacgcaggtcacacaagtctaggaggtcaaagggaaatcacaggcagaggactagggctgcttgggtaagcgtgactaatcccaacacttagttcctccggttccatggcttggagggtcacgcctgcaaccatgggcggcacatttaacaaggtgccgggacccaggaaccanggagggaaaacagcaggggggacgccccctactgtcttcctctccaccctgggtcayaccaaaaggaaggagactaaaggaacgcttttwttctcacttctctttctagatgggtaacagatcatcttcagcctgcactcctctggagtgcattctgaagcactgggactccttcgaccctgagactttgaagaaaaagcggctcattttcttttgcacaagggcatggccttcttaccatcttggggacgaanargcctggcccnntgaggggagccttaattttaatattatccaacaattagatcttttctgcagacaggagggcaaatggtccgaggtccttatgtacaggctttctttgccctgcgagacaacccagacctttgcaagcgttgcamaatcgacccagctcttttagcaatcatatcaggcaggnccaaagagaatgattccccaaaaytagaaaagcaacttccaggggaaccatctgaggcagctatcgaatgtcccagcccttccagtcccccttatctggggccacctccaaccacgccaccagctcctccasctccaccatctccaaaatttcccactcccccaccttcactcttacccctacaggaaatgcccgatggaggtgatgccactagggttcaagttcccttctcattacaggaccttaggcaaataaagggagacttaggccgattttctgatgaccctgataggtatatagaagctttccaaaatttaactcaggtatttgacctcwcatggagggatgttatgctgctcctaagccaaaccctaactgcngctgaaaaacaggcagctctgcaggcagcagagaatttcggagatgagcaatatgtctcctatagyaggccaaaagggaaaagagaaaatagggaaggcgaagaaataggggaaacaccattcccaataggaagagaggcagtacctcttgacaaccctaattggaaccccaatgacgcagkagatgaatggaaaagaaaacactttttaatgtgcatattagagggcctatggagaaccagggccaaacctcttaattactctaaactgtctatgatagancaaaagccagatgagaatcccgcagcctttatggaaaggctgagagaggcactaataaaacacacctccttatcccctgattcagtcgagggacagctaatcctgaaagacaagtttattacacagncagctcccgatattagaaggaaactacagaaacaggctataggaccagatagcaccttagaaaacctcctgagggtggccacctcggtcttttataatagggaccaggaggaggcccaagagaaggagaggaaacacaagwgaaggacagaggctctagtagccgctttgcaggcttgcaaagtccaggatccccgaggtgcatctgctagttgctatcagtgtggcaagtcagggcactttaaaaaggagtgcccaggcagcaagaagaagccacctcgaccctgtccagcctgtggcggggaccactggagatcggactgcccccggaggcggaggtcactgggttcagaaccagtctcacagatggtccagcaggactgatgggtcccggggctcaaacccctggctccagcggctcaaactgccattacagcacaggagccccgggtgattctggaaattgaaggaaggaaggtagacctccttctggacactgaagccagtctctctcctctcctctccaatccaggcctcccctcttcccatagcacgaccatgaggggcgtctcaggaaaaactctaacccgatatttttctcaaccccttagttgcagttggggggacctatgtttacacatgcctttttaatcatgcctgaaagtcccactcctttattaggtagagacattctagcttgcatgggggccagcatccttatggccccaggacaaactctttgtctcccnctggtggaagctaatattaatccggaagtgtgggcaactcaaggaagaatwggtcgagctataaccactaggccagtccagatccatcttaaggatcccacttcttttcctaaccagagacaatattccctaaagccagaggctaggaaagggctagaagccattattaataacctgaagatgcagggcctcctcaaaccctgtagcagcccctgcaacaccccaatattaggagtgcaaaaacccaatggggaatggagactagttcaggacctctgcctcattaatgaggccgtagttccaatccatccagtggttcctaatccctataccttgctgactcaaatacctgagggaactaaatggttcacagtcctagatctaaaggatgcctttttctgtataccattacatcctgactctcaatacccgtttgccttcaaagatccctccggccaaaccgcccagttaacatggacggtgctgcctcagggattttgagatagccctcacctgtttggacaggcactgtcaaaagacctctctgagttctcccatcctcaggtcaaggttttgcaatatgtagatgacattctgctctgtgccccaactgaggaagcttctcaggaaggcactgaagctcttcttaatttcttagctgacagaggatataaggtttcaaaatccaaggcccagctctgcmaaacctcagtgaagtacctgggtttagtgctgtctgaagggaccagagcattaggggaggagaggattaagcmcatttcctccttccccctccccaaaaccctcaagcaactgagaggattttggggcattacaggattttgcaggctatggatacccgggtatggtgagatagsttgccctttatatcacctcataaaagaaactcaagcggctaaaactcatctcctaacctgggaacctgaagctcaaaaggcctttaaccagctaaagcaagccttgcttaaggcaccagctctcagccttcctgtagggaaggccttcaatctttatgtatcagaaaggaagggaatggccctgggagttttaactcaggcccgaggaccagntcaacagccagtgggttacttgagtaaggaacttgatttggtggctaaaggatggccagcatgcctccgagccgttgccncagtggccctactggtcccagaagcctccaaattaaccctgggaaatgacttaactgtttataccccacataatgtggcaggattactgtcctctaggggaagcctttggctaacagacagccgnctccttaaatatcaggctttgctgttagagggwtccacmatccagttaaaaacttgctctcacctaaacccagacactttcctcccngaggaaactggggaacctgaacatgactgtgaacaaatcgtagtacagacctatgcagccagggaagatctcagggaaactcccctagaaaatccagactggaccctcttcatggatgggagctcctttgtagaacaaggaatccgtaaggcgggatatgcagtagtcactctaaataacgttattgaaagtgcgccwctctctccaggcacaagcgctcaattagctgagctgatagctcttacaagagcacttgaattaagcaaaggaaaggtagctaacatttacactgactccaagtatgctttcctagttctccatgctcatgctgccatttggaaggaaaggcactttcttaccactaatgggtctcctataaaataccatcaggaaattaacaggttattatcctcagttttccttccacgagaagtagcagtgatgcattgtaggggacatcagaagggaacagatgaaatagccaaaggaaacaagttagctgatcaggcagctaagtcagcggcaaggaagcctcaaggcatcaacacacttcaagcccctctaatctgggaaggctccataagagaaattaagcctcagtattcccctacagaaatagaatgggccacttctcgagggtatactttccagccctcagaatggctacagtcagaggatggcaaactccacttgccagcctccagccaatggaaagtccttaaaatccttcaccaagcttttcacttgggaaaggataaaacttatcaatgtgcccaaagattgttttcaggagagaacttactaaaaacagtcaaacaggttgttaatgcttgtgaagtctgtcttaaaaataatcccctgaacagacggctccttcctcctcaaacccaaaggatggaaagctatctaggggaggactggcagatagacttcacccacatgccaaagacaaagggcattcaatacctcctgkwgtgggtanataccttcactaactgggtagaagcatttccatgccgtacagaaaaggcctctgaggtagtaaaagtattagttaatgaaataactccccgctttggtctacctaagtacctccaaagtgacaatggcccctcatttaaggcagccgtcacacagggggtctcaaaggcactaggatacagtatcatctccattggcttggagaccccagtcctcaggaaaggtagagaagacaaacgatatcatcaaaagacacctcagaaaactgtcccaagaaactcaccttccttgggtcactcttcttcccatggctttactacaggtaagaaatnccccttcaaagttaggtctnagcccttttgaaatgctgtatggacggncttttcttaccaatgattttctattagaccaggagacctctgaattggttaagcatgtaacctctctggctcacttccaacaggaattaacacaactagcagaagcccaaccccaggaaataggaccacctttattcaacccagganatttggtattggtaaagkmtcnacctwctctctctccttctctaagcccaancagggagggcctcacaccgttctccttccaacgcccccggcagtaaaagttacaggaatcgactcctggatacatcacactcaagtcaaagcctggaaagctgagggagcaacccccgacagcccagaggaacgtcctgaatatcaatgtgaagaaataggagatcttaagctgaaaatcataaaagataagtaamtgagtgagggctactcatcctactcagtcccacccctacctnagcagatactttckgtcatttctacctttcctctcgaggtkcgccaccaaatattagaacttctttttgamwcatacttgcaggsagmttttgattgtcatgggattgcatttgtaacttcatagacccccaaaggagaattttacatcttggcgagtaaaattttagatggaaattatttactactccacacttgtgggaactgctatmctcactctactatttgcagtagggctatacactgtagcaccctcagagtggaatattggacagagaatctcaattgctatagtattttgcttaattattatccttatagcagggataatagttgmagaaaagaagtgaagatgaaagttttactatcactgagtctgctaggactttttattgggtttagtaatacgtcacaccgtttagctnctacaatatcagccatggcccatttatacagtaagactaattgntgggtctgtcctgagcggtttgctcagttcagtaacactaaggaacctcttgatgacccggaacttaccgtcttaggattccctttgttagctttacctttaaccattaaagacttntcaggcataaatggaacatggtatgggaacactttcaactgggtaactaactcctcccaggaaaacactcctnccccggtgccagaaaacantctccccaaagataagcttcacaccctcaggctaggaaaagttgaccgagtaatagcaaatgcctccctctgctttaaaagcagnggaaaagaaccatacttgggakatctcaaacattgtaacacatcacacttgtaattgctgaaagctcagaggtttggagaagaaaacgcaanaaggatgatctaaaagggaaaatggaagccctacgcgggggggctttcagaatctagcstctcctcctggttggaagtcccgntgggaatggcaggctctaggtaaccgccttgacacatggcactataatgtaaaaaanaacacataggncttcccaaacatgccccctcatggaattccagacccttgtatgatgcttgctaatagtagcggcntacaaatctgtgggcgaacaggagacatctggactgacggcccttgccacaaggattatctgagatattggccagggcatattgtgtccctgatcttttaaaactccatttgtcaggtggacccttctcatttggcgtgtaaaattccaaatggcatcgtgaatgactatcctgaatatggntatccctatcccaaagatgctcctattatatgtaaaaagaggaagcttctaagatatgagaaagatctgcctgtgtctctcacaagccacaacttagaaccgtcccttcaaggaacagggctatatttcctttgtggctcctggatacacttaatcctccctaggcactggaagggaacctgnactatagtngcagtggttcccgacctactatctttaaattccaccganatggcagcatcatctggggacatccctaacctagcntcttttctagagactgcgctatctcggatacancgaacaaagagatctatcatttccatgccctcgtatggagatttaactgaaagagaagactggggaggacatgcacatgacaatcctatcttagaaaaancatggataggggattctatagccagaggcctattctggtttgctggtattcctctccttgaaagatcagtacttaatatttctattatgatgcaacgagggtagaaggcaacagtaggagccatagaagcacaacmacaattcatagactctttagcctcagtagtagcgcaaaatagacaggccctagatgtccttacggccgaagtagggggtacctgtgcacttttaaatgaaacatgctgcttctggatcaacacctctagtmaagtagaggagaatctacaggtgcttaaagatcaaatcagaatcattgacaggctaagagaaaatgcgggctccagtcccaggtggctacaatccctctttaatgaattccagtcttctttatggaactggttagctcctttattaagctccctcttgctcatgtgttttgtattaatatttggaccttgtatactcaatactataactcgaattgtttcctctcgcctagaagcaatcaaactccaaatggtgctgcagaccgaaccacacatagacacgccattcttccaaggacccttagatcgaccccaggaggagccctagctgctgttccccacacgacgccccttttcagcaggaagtagccagaaagagtcgtcgtccaacaccccctaacagcagttagggttaccactccwgagggggggaa

SEQ ID NO: 55 - DNA, 95 bp, Homo sapiens
  repeat_region (1)..(95): hy3
  misc_feature (8)..(8): a is a, c, g or t
  misc_feature (76)..(76): a is a, c, g or t
tagtcaantgaagcagcgggagtggagaaggaacaaagaaatttgtaactggttgtgatcaattagttgtaaacancgctgcactccaaccagcc

SEQ ID NO: 56 - DNA, 854 bp, Homo sapiens
  repeat_region (1)..(854): in25
  misc_feature (131)..(131): n is a, c, g or t
  misc_feature (137)..(137): n is a, c, g or t
  misc_feature (144)..(145): n is a, c, g or t
  misc_feature (272)..(272): n is a, c, g or t
  misc_feature (318)..(318): n is a, c, g or t
  misc_feature (396)..(396): n is a, c, g or t
  misc_feature (415)..(415): n is a, c, g or t
  misc_feature (417)..(417): n is a, c, g or t
  misc_feature (420)..(420): n is a, c, g or t
  misc_feature (449)..(449): n is a, c, g or t
  misc_feature (554)..(554): n is a, c, g or t
  misc_feature (591)..(591): n is a, c, g or t
  misc_feature (627)..(627): n is a, c, g or t
  misc_feature (314)..(314): n is a, c, g or t
  misc_feature (479)..(479): n is a, c, g or t
gtggaaagttcctcatagcagagacacaattgcagtgctgggtacagtagggaaagtctgcacctttaccccaacaggcaggcagcctctgtgatcatgaagggtcttggagaagggatccttgttccccnctggcnctggtannccactgcagacacagctggggcttctcccacaggaacgcagcatggatgcacctatagacagcattcctggaacaattcagggtgattgcagccccacaggaggagcactctccagattcaggcctncatgagaggcagtcacaattcctccctacttggaacatcaanattnctacagatgaaaagaggtgcctgtctgatctgaatagctggaacactgggacaggagtgaggctgtgaggtggacagntttcctgctgacctggcangnganctgaggtagctcccacccttcaccctganaaaacctcagcacatctaattgagagctcncccagccaccctcatcaaggctgggacctttgcccactattggatattaaatctacccacctactttagctacanctggtgcctacccagggatacctcccttattgccctnaagcctgaatcatcaactcagtaaataaaatactgnsgagggaaaaattaaataaataaataaataaagtgtacacyackagagaacgagataagcttcawgagaycyctgccattccaacyccataggagacagtgaactcgcycacacaccaaghacgtmactactacaaccagcatctgrgaaakycakcacacaaagactctctataacyaaggaactcatacagagtcttcacccctamaagcaccmagagycaaatt

SEQ ID NO: 57 - DNA, 30 bp, Homo sapiens
  repeat_region (1)..(30): ivr
caggaggggcagctgaagcacctggagcag

SEQ ID NO: 58 - DNA, 337 bp, Homo sapiens
  repeat_region (1)..(337): ker
  misc_feature (160)..(160): n is a, c, g or t
  misc_feature (162)..(162): n is a, c, g or t
  misc_feature (210)..(210): n is a, c, g or t
agctcatctgtccactgaagatgcttggacagagttaggaatgcttcctgggagaggtaacatttgagactttcctggaagaatggtcagagtaaaccaagtaagtaggaatggaaagaggatgggaggccccagcttcccagaggcataaggtgaggangnccctatgcattcagatgtggcccaccctggggtctggtggactaaagncttggacaccccagatcagccttagtgggatgaggcaggaaagacagctgagggtcagaacccaggcaggtccaatgccagggtgggcatttcgagttggtgagacatttcaccctggtgccaagct

SEQ ID NO: 59 - DNA, 5403 bp, Homo sapiens
  repeat_region (1)..(5403): l1
gggggaggagccaagatggccgaataggaacagctccggtctacagctcccagcgtgagcgacgcagaagacgggtgatttctgcatttccaactgaggtaccaggttcatctcactggggagtgccagacagtgggcgcaggacagtgggtgcagcgcaccgtgcgtgagccgaagcagggcgaggcatcgcctcacccgggaagcgcaaggggtcagggaattccctttcctagtcaaagaaaggggtgacagacggcacctggaaaatcgggtcactcccgccctaatactgcgcttttccgacgggcttaaaaaacggcgcaccaggagattatatcccgcacctggctcggagggtcctacgcccacggagtctcgctgattgctagcacagcagtccgagatcaaactgcaaggcggcagcgaggctgggggaggggcgcccgccattgcccaggcttgattaggtaaacaaagcggccgggaagctcgaactgggtggagcccaccacagctcaaggaggcctgcctgcctctgtaggctccacctctgggggcagggcacagacaaacaaaaagacagcagtaacctctgcagacttaaatgtccctgtctgacagctttgaagagagcagtggttctcccagcacgcagcttcagatctgagaacgggcagactgcctcctcaagtgggtccctgacccccgagtagcctaactgggaggcaccccccagtaggggcggactgacacctcacacggccgggtactcctctgagacaaaacttccagaggaacgatcaggcagcagcatctgcggttcaccaatatccactgttctgcagccaccgctgctgatacccaggcaaacagggtctggagtggacctccagcaaactccaacagacctgcagctgagggtcctgtctgttagaaggaaaactaacaaacagaaaggacatccacaccaaaaacccatctgtacgtcaccatcatcaaagaccaaaggtagataaaaccacaaagatggggaaaaaacagagcagaaaaactggaaactctaaaaatcagagcgcctctccttctccaaaggaacgcagctcctcaccagcaacggaacaaagctggacggagaatgactttgacgagttgagagaagaaggcttcagacgatcaaactactccgagctacgggaggaaattcgaaccaacggcaaagaagttaaaaactttgaaaaaaaattagatgaatggataactagaataaccaatgcagagaagtccttaaaggacctgatggagctgaaaaccaaggcacgagaactacgtgacgaatgcagaagcctcagtagccgatgcgatcaactggaagaaagggtatcagtgacggaagatgaaatgaatgaaatgaagcgagaagagaagtttagagaaaaaagaataaaaagaaacgaacaaagcctccaagaaatatgggactatgtgaaaagaccaaatctgcgtctgattggtgtacctgaaagtgacggggagaatggaaccaagttggaaaacactctgcaggatattatccaggagaacttccccaatctagcaaggcaggccaacgttcagattcaggaaatacagagaacgccacaaagatactcctcgagaagagcaactccaagacacataattgtcagattcaccaaagttgaaatgaaggaaaaaatgttaagggcagccagagagaaaggtcgggttacccacaaagggaagcccatcagactaacggctgatctctcggcagaaactctacaagccagaagagagtgggggccaatattcaacattcttaaagaaaagaattttcgacccagaatttcatatccagccaaactaagcttcataagcgaaggagaaataaaatactttacagacaagcaaatgctgagagattttgtcaccaccaggcctgccctaaaagagctcctgaaggaagcgctaaacatggaaaggaacaaccagtaccagccgctgcaaaaacatgccaaattgtaaagaccatcaaggctaggaagaaactgcatcaactaacgagcaaaataaccagctaacgtcataatgacaggatcaaattcacacataacaatattaactttaaatgtaaatgggctaaatgctccaattaaaagacacagactggcaaattggataaagagtcaagacccatcagtgtgccgtattcaggaaacccatctcacgtgcagagacacacataggctcgaaataaaaggatggaggaagatctaccaagcaaatggaaaacaaaaaaaggcaggggttgcaatcctagtctctgataaaacagattttaaaccaacaaagatcaaaagagacaaagaaggccattacataatggtaaagggatcaattcaacaagaagagctaactatcctaaatatatatgcacccaatacaggagcacccagattcataaagcaagtcctgagtgacctacaaagagacttagactcccacacaataataatgggagactttaacaccccactgtcaacattagacagatcaacgagacagaaagttaacaaggatacccaggaattgaactcagctctgcaccaagcggacctaatagacatctacagaactctccaccccaaatcaacagaatatacattcttttcagcaccacaccacacctattccaaaattgaccacatagttggaagtaaagctctcctcagcaaatgtaaaagaacagaaattataacaaactgtctctcagaccacagtgcaatcaaactagaactcaggattaagaaactcactcaaaaccgctcaactacatggaaactgaacaacctgctcctgaatgactactgggtacataacgaaatgaaggcagaaataaagatgttctttgaaaccaacgagaacaaagacacaacataccagaatctctgggacacattcaaagcagtgtgtagagggaaatttatagcactaaatgcccacaagagaaagcaggaaagatctaaaattgacaccctaacatcacaattaaaagaactagaaaagcaagagcaaacacattcaaaagctagcagaaggcaagaaataactaaaatcagagcagaactgaaggaaatagagacacaaaaaacccttcaaaaaattaatgaatccaggagctggttttttgaaaagatcaacaaaattgatagaccgctagcaagactaataaagaagaaaagagagaagaatcaaatagacgcaataaaaaatgatacaggggatatcaccaccgatcccacagaaatacaaactaccgtcagagaatactataaacacctctacgcaaataaactagaaaatctagaagaaatggataaattcctcgacacgtacactctcccaagactaaaccaggaagaagttgaatctctgaatagaccaataacaggctctgaaattgaggcaataatcaatagcttaccaaccaaaaaaagtccgggaccagatggattcacagccgaattctaccagaggtacaaggaggagctggtaccattccttctgaaactattccaatcaatagaaaaagagggaatcctccctaactcattttatgaggccagcatcatcctgataccaaagcctggcagagacacaacaaaaaaagagaattttagaccaatatccttgatgaacatcgatgcaaaaatcctcaataaaatactggcaaaccgaatccagcagcacatcaaaaagcttatccaccatgatcaagtgggcttcatccctgggatgcaaggctggttcaacatacgcaaatcaataaacgtaatccagcatataaacagaaccaaagacaaaaaccacatgattatctcaatagatgcagaaaaggcctttgacaaaattcaacaacgcttcatgctaaaaactctcaataaattaggtattgatgggacgtatctcaaaataataagagctatctatgacaaacccacagccaatatcatactgaatgggcaaaaactggaagcattccctttgaaaactggcacaagacagggatgccctctctcaccactcctattcaacatagtgttggaagttctggccagggcaatcaggcaggagaaggaaataaagggtattcaattaggaaaagaggaagtcaaattgtccctgtttgcagatgacatgattgtatatctagaaaaccccatcgtctcagcccaaaatctccttaagctgataagcaacttcagcaaagtctcaggatacaaaatcaatgtgcaaaaatcacaagcattcttatacaccaataacagacaaacagagagccaaatcatgagtgaactcccattcacaattgcttcaaagagaataaaatacctaggaatccaacttacaagggatgtgaaggacctcttcaaggagaactacaaaccactgctcaatgaaataaaagaggatacaaacaaatggaagaacattccatgctcatgggtaggaagaatcaatatcgtgaaaatggccatactgcccaaggtaatttatagattcaatgccatccccatcaagctaccaatgactttcttcacagaattggaaaaaactactttaaagttcatatggaaccaaaaaagagcccacatcgccaagtcaatcctaagccaaaagaacaaagctggaggcatcacgctacctgacttcaaactatactacaaggctacggtaaccaaaacagcatggtactggtaccaaaacagagatatagaccaatggaacagaacagagccctcagaaataatgccgcatatctacaactatccgatctttgacaaacctgagaaaaacaagcaatggggaaaggattccctatttaataaatggtgctgggaaaactggctagccatatgtagaaagctgaaactggatcccttccttacaccttatacaaaaattaattcaagatggattaaagacttaaacgttagacctaaaaccataaaaaccctagaagaaaacctaggcaataccattcaggacataggcatgggcaaggacttcatgtctaaaacaccaaaagcaatggcaacaaaagccaaaattgacaaacgggatctaattaaactaaagagcttctgcacagcaaaagaaactaccatcagagtgaacaggcaacctacaaaatgggagaaaatttttgcaacctactcatctgacaaagggctaatatccagaatctacaatgaactcaaacaaatttacaagaaaaaaacaaacaaccccatcaaaaagtgggcaaaggatatgaacagacacttctcaaaagaagacatttatgcagccaaaaaacacatgaaaaaatgctcatcatca

SEQ ID NO: 60 - DNA, 1883 bp, Homo sapiens
  repeat_region (1)..(1883): l180_5
  misc_feature (60)..(60): n is a, c, g or t
  misc_feature (164)..(164): n is a, c, g or t
  misc_feature (1375)..(1375): n is a, c, g or t
  misc_feature (1380)..(1380): n is a, c, g or t
  misc_feature (1427)..(1427): n is a, c, g or t
  misc_feature (1694)..(1694): n is a, c, g or t
  misc_feature (1728)..(1728): n is a, c, g or t
  misc_feature (1762)..(1762): n is a, c, g or t
tttttttcccaagatggcggattagaggcttttagtatgcctcagccacttggaaatggnaaaatagtgcataaagatcaactctgtgagctttaattcaagaaggaaaatgggaatccaccataatcgtgaaggacaccccagatcctagggaggagaatgtnggcaaacagcccctatgatggcgtccagctgataaaagtgagtgaagccccagtacgcgagagaggcagagagtctccctctgtgactcacttttccactggggatccgagcaacccaggccaagggagaacactttgtttctcccaagccctggagctaacgtggggagaggcttggagatgctgtgagggaaagacaccgggaaaagctgcagacattttcccagacctaggamcaagagcaggatgccatttttaatccgggcgcatacaaagtcagccattctttggcgacccggcagcgtggccgcgcaggcattttagtctcaggccagagattggagcgcctgctctggagtagggtaggggcctccacagccagaactgtgaaaagcgcctcagcagtaggcgctggaattgtgctctcccctactgcaagcctggggcgggaggagagctgctacagctgcagtttctcctgggcggcgagacttgcagccagggccagcttggcgacctggaactggtctgtgtgtgccattgctgggtgccccagcctgctcccctgagatcgtggtgcagsggggccctctctgctccacgcccaggcagatctccaggcattcagagcacccgctcgcctggwtcagcagcctgagccgccccacccttcctgkgcatagatcgtggtgcagsggggccctctctgctccacgcccaggcagatctccaggcattcagagcacccgctcgcctggwtcagcagcctgagccgccccacccttcctgkgcatagatcgtggtgcagsggggccctctctgctccacgcccaggcagatctccaggcattcagagcacccgctcgcctggwtcagcagcctgagccgccccacccttcctgkgcatagatcgtggtgcagsggggccctctctgctccacgcccaggcagatctccaggcatctggagcacccactctcctggattaggagtttaagccgccccacccttcccgtgcagagaacttggggctgaggaggtttccctgctccacgcctaggcacacctctgggcgcttggtggctgcccactggattctcccttggcgctggcgcttgtgcccgccatgggagatctgtaggcggacctgcctagtccggccccacccatcttggmccccgcccctccagggctgagcagrsagttcagancactntgcattccatgcatcagcccattkcctgaggcaacagagagcttctnccagtaaacaaggatcaaatatatacccagccacactggccgtagctagctcttacctataagcgccatctactggcttgtaggtcaaactgcacwgcccaatataaaacctgctaaaagaagtgcatagggctatagaagcaaagccaaaagaccatacccagcattctctacagtcacaccmcctagggaggaggagaaaggaaagggaaagaaaaaacaccaataatattatagggaaagaaagaaaagaaaaaaccctactcncatggaaataattacaaaaattagaagtgccagnatctccagatgagaaggaaccagcacaagaattntggcaccatgaaaaatctgaatgtagtgacaccaccaaaggatcgcactagctctccagcaatggttcctaatcaaaacggaaactcagaaatgacaggcaaagaattcaaagcatggatt

SEQ ID NO: 61 - DNA, 2890 bp, Homo sapiens
  repeat_region (1)..(2890): l1m2_5
  misc_feature (379)..(379): n is a, c, g or t
  misc_feature (543)..(543): n is a, c, g or t
  misc_feature (596)..(596): n is a, c, g or t
  misc_feature (680)..(680): n is a, c, g or t
  misc_feature (715)..(715): n is a, c, g or t
  misc_feature (745)..(745): n is a, c, g or t
  misc_feature (1195)..(1195): n is a, c, g or t
  misc_feature (1363)..(1363): n is a, c, g or t
  misc_feature (1747)..(1747): n is a, c, g or t
  misc_feature (1977)..(1977): n is a, c, g or t
  misc_feature (2049)..(2049): n is a, c, g or t
  misc_feature (2049)..(2051): n is a, c, g or t
  misc_feature (2062)..(2062): n is a, c, g or t
  misc_feature (2159)..(2159): n is a, c, g or t
  misc_feature (2166)..(2166): n is a, c, g or t
  misc_feature (2224)..(2224): n is a, c, g or t
  misc_feature (2249)..(2249): n is a, c, g or t
  misc_feature (2266)..(2266): n is a, c, g or t
  misc_feature (2273)..(2273): n is a, c, g or t
  misc_feature (2752)..(2752): n is a, c, g or t
  misc_feature (2881)..(2881): n is a, c, g or t
  misc_feature (2154)..(2154): n is a, c, g or t
  misc_feature (2332)..(2332): n is a, c, g or t
caaagaaatgtatktatgcaggagggcttcaagatggctgactagaggcakccggtactcgcctcctccacaaagaagaaccaaaatagcgagtagataatcacacttcgaatagakcatctaagagagaacactggaattcaacagagaagcgacaggaaacacctaaagcaaggaaggagaaggaagcgaggcagcctgctcggccgggattggctgggagccaggagaggctccccaatgcggggaaagggtaagtgagagacccccagcggtccacattcccaccacggactcctgcaatcctagccacgagagagcccctcaaccctcgcgggccctgagactaacatagggagctgcctggagwccgcgcganggcattgctccagagagggagctcacgctgggtcccacamacccccaagwcctaagcagctgcagcacggcgccattttgagagcccagccmccaccagactgcatcctgccctggggcccaacagcccctgcatctccacattcctggagccccastgacatnccccacccatggctgcagctgctggggcaraggcaggaaccactggcagcaancccwcccctgcccagcagaggggtggccatacaatttcatryacaccaaggacaaattcccctgmctgcaaatgctaccactgngagctgctgtggagctgaggyacgagcaatgcacncgctacccaggcgcctgcctatggctgctnccacwgaaagcaaccccaccctccccagcagcagggccacagtgcagccactgctgccctccacctgagcattccaccaggggcctggggatcaccctgcccctgcctaccacagccggcgcctgcacacaccaccggggggcctgaggacaggcctgcccggcccagctctgccacacccmccagtgcccaagcacgccatctaggggcctggggatcgcccaacccagtccaccaccgctggcacctgagcactcctcctgggggcctgaggacgggcctactcagcctgccactaccaccacagctggcacccacccacatgcgccacctgsrggcctggggactggcccgcccagcccgtcgcagccactgccaacaccaacacgcactgcttgggacccagagggttgtcccaccactgctactgccatcgcccatgccatgcyngctgcccaggggctcaagaacctgtccacccacccggcccaccgctgccactactggcacccaagcaagccacctggaggcccaagaatcggcctgcctggacccgctaacaccagtgccaatatatgccaccctggggcccaaggacaggcacactcagcccactantgccaccactggggcctgaagactggcccacctggcatcccagtccccagcaaaacttcaccacagcctccactaacaaccacaccctaagccactgaggaaatcacagacaccactgatgctgtttacagccaaagaaatcatacggagactacactactgcacgcacccagaatcaaagccaaagcgccctacccaaccaacaccatagatacatctwcaggaaaaagtccttccctacgaaagctamtccataaaattggaagaagcgactgttacaccagatgtgcagatatcaacgtaaggacacaagaaacatgaaaaagcaaggaaacatgacacctccaaaggaacacaataattctccagtaayagactccaawnaaaaagaaatctatgaaatcccmgawaaakaattcaaaatgatgatattaaagaagctcagtgagatacaagagaacwcagawaaacaatacaaggaaatcaggaaaacaattcakgatatgaatgagaaatttaccaaagagatagatatcataaaaaagaaccaaacagaaatcctggaactgaagaattcawtgaatgaaatamaaaatacatttgaaagcttcaanaatagactagatcaagcagaagaaagaatctcagaacttgaagacaggtcttttgaaataacccagtcagannnwaaaaaawaanaataaaaaagaatgaasaaagcctatgtgacatatgggacacmattaagcgaacaaatatttaaattwtgggwgttccagaagaagaagagntgggnaaaggcnyagaaaacctatttaataaaataatagctgaaaacttcccaggtttagcaagagattnagacatccagatacaggaggctcanagatccccaaatagatncaacgcnaaaagggcctctccamggcacattatagtcaaactgtcaaaagtcaaagacaaagaganaattctaaaaacagcaagagaraagcatctagtcacatataagggaatccccatcagactaacagtggatttctcagcagaaaccttacaggccaggagagaatgggatgacatattcaaagtgctgaaagaaaaagcaaaactgccagccaagaatactatacccagcaaagttatccttcaaaaatgaaggagaaataaagtctttcccagacaagcaaawamtgagggaattcgtcaccactagaccggccctacaagaaatgctcaagggagtcctamacctggaagcaaaaggacgatatctaccatcatgaaaacayacaaaagyataaaactcactggtagagcaawcacacaaakgagaaagagaaaggaatcaaatgktaccactacagaaawccaccaaaccacaaaganaaacaatgagaggaaacaaaagatatacaaaacaaccagaaaacaattaacaatatgacaggaacaagwcctcacatatcaataataaccttaaacgtaaatggattaaatttcccacttaaaagatanagactggct

SEQ ID NO: 62 - DNA, 3806 bp, Homo sapiens
  repeat_region (1)..(3806): l1m3_5
  misc_feature (28)..(28): n is a, c, g or t
  misc_feature (52)..(52): n is a, c, g or t
  misc_feature (118)..(119): n is a, c, g or t
  misc_feature (154)..(154): n is a, c, g or t
  misc_feature (269)..(269): n is a, c, g or t
  misc_feature (308)..(308): n is a, c, g or t
  misc_feature (326)..(326): n is a, c, g or t
  misc_feature (341)..(341): n is a, c, g or t
  misc_feature (374)..(374): n is a, c, g or t
  misc_feature (393)..(393): n is a, c, g or t
  misc_feature (466)..(467): n is a, c, g or t
  misc_feature (611)..(611): n is a, c, g or t
  misc_feature (637)..(637): n is a, c, g or t
  misc_feature (686)..(686): n is a, c, g or t
  misc_feature (719)..(719): n is a, c, g or t
  misc_feature (728)..(728): n is a, c, g or t
  misc_feature (774)..(775): n is a, c, g or t
  misc_feature (785)..(785): n is a, c, g or t
  misc_feature (843)..(843): n is a, c, g or t
  misc_feature (865)..(865): n is a, c, g or t
  misc_feature (881)..(881): n is a, c, g or t
  misc_feature (969)..(969): n is a, c, g or t
  misc_feature (985)..(985): n is a, c, g or t
  misc_feature (998)..(998): n is a, c, g or t
  misc_feature (1064)..(1064): n is a, c, g or t
  misc_feature (1094)..(1094): n is a, c, g or t
  misc_feature (1310)..(1310): n is a, c, g or t
  misc_feature (1332)..(1332): n is a, c, g or t
  misc_feature (1346)..(1346): n is a, c, g or t
  misc_feature (1360)..(1360): n is a, c, g or t
  misc_feature (1543)..(1543): n is a, c, g or t
  misc_feature (1755)..(1755): n is a, c, g or t
  misc_feature (1843)..(1843): n is a, c, g or t
  misc_feature (2203)..(2203): n is a, c, g or t
  misc_feature (2415)..(2415): n is a, c, g or t
  misc_feature (2444)..(2444): n is a, c, g or t
  misc_feature (2514)..(2514): n is a, c, g or t
  misc_feature (2557)..(2557): n is a, c, g or t
  misc_feature (2616)..(2616): n is a, c, g or t
  misc_feature (2634)..(2634): n is a, c, g or t
  misc_feature (2642)..(2642): n is a, c, g or t
  misc_feature (2752)..(2752): n is a, c, g or t
  misc_feature (2777)..(2777): n is a, c, g or t
  misc_feature (2788)..(2788): n is a, c, g or t
  misc_feature (2852)..(2852): n is a, c, g or t
  misc_feature (2861)..(2861): n is a, c, g or t
  misc_feature (2868)..(2868): n is a, c, g or t
  misc_feature (2874)..(2874): n is a, c, g or t
  misc_feature (2942)..(2942): n is a, c, g or t
  misc_feature (2975)..(2975): n is a, c, g or t
  misc_feature (2978)..(2978): n is a, c, g or t
  misc_feature (3014)..(3015): n is a, c, g or t
  misc_feature (3021)..(3021): n is a, c, g or t
  misc_feature (3032)..(3032): n is a, c, g or t
  misc_feature (3071)..(3071): n is a, c, g or t
  misc_feature (3084)..(3084): n is a, c, g or t
  misc_feature (3148)..(3148): n is a, c, g or t
  misc_feature (3155)..(3155): n is a, c, g or t
  misc_feature (3183)..(3184): n is a, c, g or t
  misc_feature (3192)..(3192): n is a, c, g or t
  misc_feature (3224)..(3224): n is a, c, g or t
  misc_feature (3263)..(3263): n is a, c, g or t
  misc_feature (3269)..(3270): n is a, c, g or t
  misc_feature (3282)..(3282): n is a, c, g or t
  misc_feature (3285)..(3285): n is a, c, g or t
  misc_feature (3295)..(3295): n is a, c, g or t
  misc_feature (3357)..(3357): n is a, c, g or t
  misc_feature (3460)..(3460): n is a, c, g or t
  misc_feature (3511)..(3511): n is a, c, g or t
  misc_feature (3624)..(3624): n is a, c, g or t
  misc_feature (3695)..(3695): n is a, c, g or t
  misc_feature (3715)..(3715): n is a, c, g or t
  misc_feature (3740)..(3740): n is a, c, g or t
agagcaagatggcagaacagaatgctcnaacaattgcccccatyctryyccnccacaggaacaccaaattgaacaactatctacacaaaawagcaccttcataagaaccaaaaatcanntaagcgatcacagtacctggttttaacttcatatnactgaaagaggcactgaagagggtaggaaagacagtcttgaatcgccaacgccgcccctcccccatcccccggcagtggccgcacggcacggagagagaatccgcgcacttgggngagggagagcgcagcgattgtgggactttgcgttggaantcagtgctgccctgtcanagcggaaagcaacancgggcagaactcagccggcgctcatagagggancatttagaccagccctagncagaggggaatcacccatcccagcggtcggaacctaagttccggcaagcctcgccaccgtgggctaaagtgcnntagggtcctaaataaacttgaaaggcagtctaggccacaaggactgcaattcctgggcaagtcctggtgctgtgccgagctaagagtcagtggacttagggggcacacgacctagtgagacacyagccggggtggccaagggantgcttgcgccacccyctcccycaacnccaggcagcacaactcgcagctccgggagagactccttccctccgcttnaggagaggagagggaagagtaaagaggactttntcttgcaantcggataccagctcagccatagtaggatagggcaccgagcagagtnnwgaggycccnattctaggccctagctcccggatgacatttctaaacacaccctgggccagaagggaanctgctgccttaaagggaagganccagtcctagcaggantcatcacctgctgactaaagagcccttgggccctgaataatcagcagcgatacccaggttagyactcgccgtaggccttgggtgagantctgagacgtgctggnttcaggtgtgacncagcacattcccagctgtggtggctacggggagagactccttctgcttgagaaaaggagagggaanagtaaaggggactttgtcttgcagcttagntaccagcttggccacagtggagtagagcaccaagcgggctcttagggtccccgattccaggccttggctgttggatggcatttctggacctgccctgggccagaggagagcccactgccctgaagggagagtctcaggcctggcagcattcaccgcaagctgacagaagagtccttgggctttaagtgaacattkgcgrtagycaggcagtacttnctgtgggcctgcggcggtggtngccatagggagagnctcctctgcttgtngaaaggggagggaagagtgggaagaactttgtcttgtggcttgagtgccagctcagccgcagtagaacagagcaccgggtagatttctaaggtttccgactccaggccctggctcctggatagcatcyctggacgtgcccggggccagagagaactcaccaccctgaagggaaggatacaagnctggctggctttaccacctgctgattgtagagtcccggggccttgagcgaacataagcagcggccaggcagtggttactgcgggccttgggcgagacccagtgctgtgctggcttcaggtctgaccyagtacagtcycagtgrtggtggccacaggggtgcttgtgtcacccctccyccagctccaggcagctcagcacagagagagagacngagtttgtttgrgggaaagtaarggaagagaacaagagtctctgcctggtaatccagrgaattcttccagatcttatccaagaccacnaaggcagtacctctacgagtctgcaagagccacagtattactgggcttggggtgccccctaatgcagatacggccgcagtgacaaaaaacttagatcacaacacycaagtcccttcaaatacctggaaagcyttcccaagaaggacgggtacaaacaagcccagactgtgaagactacaataaatacctaactcttcaatgcccagacacagacaaacatctacaagcatcaacaccatccaggaaaacatgacctcaccaaatgaactaaataaggcaccagggaccaatcccggagaracagagatatgtgacctttcagacagagaattcaaaatagctgttttgaggaaactcaangaaattcaagataacacagasaaggaattcagaatyctatcagataaatttaacaaagagattgaaataattaaaaagaatcaagcagaaattctggagctgaaaaatgcaattgacatactgaagaatgcatcagagtytcttaacagcagaattgatcargcagaagaaagaattagtgagcttgaagacaggctatttgaaaatacgcngycagaggagacaaaagaaaaaagaaaanaatgaagcatgcctacaagatctagaaaatagcctcaaaagggcaaatctaagagttagtgaccttaaanaggaggtagagagagagataggggtraaagtttattcaaagcnataataacagagaatgtcccaaacctagagaaagatatcaatattcaagtaaaagaagnttatagaataccaagcanatttaacncaaagaagactacctcaagacatttawtaatcaaactcccaaaggtcaaggataaagaaaggatcctaaaagcagcaagagaaaagaaacaaataacatacaatggagcnccgatatagtctggcagcagacttntcggcggaaancttacaggccaggagagagcggcatgacatatttaaagtgctgaagaaaaaaaaaaaaactttnatcctagantagcgtntccagngaaaatatccttcaaacatgaargagaaataaagactttcccagacaaacaaaagctgagggatttcntcaacaccagacctgtcctacaagaaatgctanagngaattcttcaatgtgaaagaaaaggacgttaatgannaataanaaatyatctgnaggtrcaaaactcactgataatagtgcgcagaaaaacanaatattataacantgtaattatggtgtataaactactcttragtagaaagactaaaagatgaaccaatcaaaaatantaactanaacaacttttcaagacatagacagtacnntaagatanaaatagaaacaacaaaaagtttaaaaattggnggacgaagttaaaatgtagagtttttattagttttcttnttgttnnttgrtttttttnaanttatgtaatnagtgttattatcagtttaaaatataggatattatttgcaagcctcatggtaacctcaaatcnaaaaacatacaacggatacacaaaaataaaaagcaagaaattaaaacatatcaccagagaaaatcaccttcactaaaaggaagacaggaaggaaggaaagaanaaagagaagaccacaaaacaaccagaaaacaaataasaaaatggcaggagnaagtcattacttatcaataataacattgaatgtaaatggactaaactctccaatcaaaagacatagagtggctgaatggatataaaaataagacccaatgatcggtcgcctanawgwaacacacttcacctataaagacacakatagactgaaaataaagggatgaaaaaagatatttcatgcnaatggaaaccaaaaaagagnaggagtagctatacttayatcaganaaaatatatttcaagacgaaaactataagaagagacaaagaaggtcactatataatgataaaggag

SEQ ID NO: 63 - DNA, 1765 bp, Homo sapiens
  repeat_region (1)..(1765): l1m3a_5
  misc_feature: n is a, c, g or t
  misc_feature (135)..(135): n is a, c, g or t
  misc_feature (138)..(138): n is a, c, g or t
  misc_feature (145)..(145): n is a, c, g or t
  misc_feature (234)..(234): n is a, c, g or t
  misc_feature (340)..(340): n is a, c, g or t
  misc_feature (377)..(377): n is a, c, g or t
  misc_feature (421)..(421): n is a, c, g or t
  misc_feature (563)..(563): n is a, c, g or t
  misc_feature (622)..(622): n is a, c, g or t
  misc_feature (817)..(817): n is a, c, g or t
  misc_feature (935)..(935): n is a, c, g or t
  misc_feature (945)..(945): n is a, c, g or t
  misc_feature (963)..(965): n is a, c, g or t
  misc_feature (1009)..(1009): n is a, c, g or t
  misc_feature (1017)..(1017): n is a, c, g or t
  misc_feature (1119)..(1119): n is a, c, g or t
  misc_feature (1659)..(1659): n is a, c, g or t
gagtgawgtcagcaagatggcagaatwggaggtctcaggctccagtctccctcacagaaagtccgactagcaactattcacagacaagaacgcctttgtgaaaaatgccagaacttggaaatgagrctgagacanctncgtggancacagaaacgaataaaaaccacattaaaagggtaagaggaaccgtctcactttaaccacgttgcccctmagtcggcacagtrccacacngagagaawttccccgggcctacagtttctacagtgggaaaagagagctkgaggtggacatccagcttccctagcattccaagatgcttcccaggargcccactcynatctcacctcatgaggaaacactgagggaaatggcanggctagaccgtctggagtcaggtagaaacaaaaaaagggggcanagctcatagtaaccagtgcacggatcttggtggtagctctgtattcctgccagcggtggcgcctgatcagaggtaccagccaatggcatagcccacccgcaaagctgagctggtcgctcccagaagcacggtgagaagttcnacccggcttgagtccctagatggccagcctccaaacccagccttagascctaccccagngctccacccaggcagggagatacacaccacmatgtatttcagcagagcacagaggctagacctgcctgacccaggagcccaaacagtgactcggcccagcctcaaagcccaccccaaggacccacacaggcaggaaggcaaacgcggattgtgcakctctaccagggcaaagtgccagccaccgtccattcstwncagcaattccatctaaccttgcagcctaggggctggccctgcccaactgcagagctsaaacagcggctccgcctggccasagagtmtaccccgtggcycagcccaatagacgcgactncaacgtccantcagcggctccgcctaannncagagcccagccagcagccccgcctgacctcagagcmcaggcantagcccgnccagctagagaacccaamagcaagcactgcctacccatggttattaccagctgtcccatccagaatcacaagctggactgaataatgaaggtctwttcctgncgaagaacacctgtaaaagccagaagaggtggctgcctmgtcaaatgcatggataccaatgcaaggacgcaagggttacgaagaatcaaagaatcatgacacctccaaaataaactaacaaagctccaacaatggamcctaaagaaataaagatctataaaatgactggcaaagaattcagaataatcctcttaaagaagttcggtgagctacaagaatacatagatagaaaattaaataaaatttggaaaacaatacatgaamaaaacgaaaagtttgacaaagaaatagaaacgawtattctaaaacccaaatagaaatcctagagatgaagaacacaattgctgaacaaaaaaattcaataaaaagcttcgacagcagactcaatcaagcagaagaaagaatcagtgagctcgaagacagaacatttgaaattatccagtmagaggatcaaaaataaaaaaaatgaaaaacagtgaagaaagcctataggaattatgggacaccatcaagaaaactaacatacgcataatagaaatnccagaaggagaagagaaagaaggccagaaagyatattttaagaaataatgactgaaaacttcccaaatctggggaaagatgccagcatccaggtacaagaagcaca

SEQ ID NO: 64 - DNA, 1175 bp, Homo sapiens
  repeat_region (1)..(1175): l1m3b_5
  misc_feature (164)..(164): n is a, c, g or t
  misc_feature (308)..(308): n is a, c, g or t
  misc_feature (358)..(358): n is a, c, g or t
  misc_feature (439)..(439): n is a, c, g or t
  misc_feature (467)..(467): n is a, c, g or t
  misc_feature (485)..(485): n is a, c, g or t
  misc_feature (695)..(695): n is a, c, g or t
  misc_feature (1033)..(1033): n is a, c, g or t
ggagtgagaacagcaagatggcagaataggaggtcccccactcatattccctcacagcaacaataatttggcagtcatccacgaacaaaagtgcctttgtgggagctttgggatccaggtaggaggttgcgaaacccwggtggagcccaagaccaaggaggacnatttgagaaggcaggcctgtgaccagatggcaggcttgctgatcatggtcttggctacagacccagaaacaktgctgtmcccctgtggactcagctacagcccyaattggccttggtcctgccaccmrmamcatmctccaaganacccaggaggagccatacccacccatgcctcgggtaacaggcccgccaanctcggtcctggctgtggaycctgaagcggcccatgacccagctccatcccctctcagmtgtggtcaggagccagtcctgcncgcccagggacccgcccagtgacctggnaagagcattcccagggantcagcaggagccacacccacacatatacctggtawcaggtctaccacgtgcagaaccaactgcagatcctgaagcagccctgtaactcagttccagctctacccaaccaaggttctgaatgtagtcctgcctatccaaagattcggcaagaggcatacccatccgtgctactggaggcaggcttgccaacctcagtctsactgtggatcntgaagyagcagccatgtgacccggctccaaccccaytyaactgcgatcccagtggmaatctcatcagcccagggatctracaggagaaggtcttcctcccaaaaccagtctgtaawgactgaaagaggtgtttgytccttcaaatgcacggacatcaacataaggctacacagatwataaagaatcaggcaaacatrmcaccaccaaaggaaactaawaaagttccagtaaccaaccccaaagaaacggagatctawaaattacctgacaaagaattcaaaataatcatcttaaagaakctcaatgagatgcaagagaacacagatakacaactaaanaaaatcaggaaaacaatkcatgaacaaaatgagaagtttaacaaagaaatagaaaccataaaaaagaaccaaatagaaatcctggarctgaagaatacaatgaaagaaataaaaaattctatagaaagctttaacaggagac

SEQ ID NO: 65 - DNA, 1625 bp, Homo sapiens
  repeat_region (1)..(1625): l1m3c_5
  misc_feature (424)..(424): n is a, c, g or t
  misc_feature (801)..(801): n is a, c, g or t
  misc_feature (1079)..(1079): n is a, c, g or t
gagtgatgtcagcaagatggcagaataggaggtctcagccctatccccccacagaaacaccgattttgacgaatacmcacggatgagagtacctttgwgggagtccgggagtccagtggacaagttccagcacaccgttggagwaaaaaatctaagaatagatgcattgaagagggtaagaagaacagtttcactttacccacgtcacccctcccccaaggtggcatagctcagtgccaagagagwctcctttggtccgcgatttctcccgcaggggaaagtgagagcatagtgagtgagcgtccggctcccccagccatgcgggacgctgcccaggaggcccacttttttctcaccccacccagaacactgaggkgatcggcatggctgagtggttgggagaggctgaaagcagggaagagangmtggggactcacagcagccagggcatggaactcaacmaaaggccacagatcctactaactgcttcgcggactccatcaggaagcccgcccacaagcttcwtgggatacgttgcctgcagacccccccagctggcccacgggcgcccccaacgctctgtatgcctcacccctggcttcggcatggctcccaagtgcactcctgtggacagcgagtgcaagcctctgcagatggcttacgagcacgcgcagacagccggcttgactctgcwgwattggaagaagstacacaaacttgagcatttcagggcaccgccctaggaaaaagaaacggaagcctctttgcactcggcctggctttgcaggattgagagaaganatacaatcttatctgcacctagcmtggctttgtgggattgagagaaggcatacaatcctaagacttacctcctcctcargagggaacaagaggwgtggagtgggyacatcmatagaaaaggtctgagagagycccagaatccctagccaggctggttggtgaaggtctttctcttctgaagccagtcagtaaagactggaggaggtgactgtttcttcaaatgtgaagacagcaatgcaagactttaagaaacatgaaaaatcaaggaaacatgacantaccaaaggaacataataattttccagtaaccgaccctaaagaaatggagatctacaaattgcctggcaaataattcaaaataatcgttttaaggaagctcagtgagctacaagaaaacacagatagacaactcaacaaaatcaggaaaacaatacatgaacaaaatgagaagttcgacaaagatatagaaatcgtaaaaaagaaccaaacagaaattctggagctgaagaatacaatgactgaacaaaaaaatgcaatagagagcwtcaacagcagactcgatcaagcagaagaaagaatcagcgagctcaaagacaggtcatttgaaattatccagtcagaggatcaaaaaaaaaaaaaatgaaaaagagtgaagaaagcctgtgggatttatgggacaccatcaagagaaccaatatacgcatcatggaaatcccagaaggagaagagagagagaaaggggcagaaagcttatttaaagaaataataactgaaaacttcccaaatctggggagagatatggacatccaggtacaagaagcaca

SEQ ID NO: 66 - DNA, 1375 bp, Homo sapiens
  repeat_region (1)..(1375): l1m3d_5
  misc_feature (435)..(435): n is a, c, g or t
  misc_feature (462)..(462): n is a, c, g or t
  misc_feature (479)..(479): n is a, c, g or t
  misc_feature (506)..(506): n is a, c, g or t
  misc_feature (613)..(613): n is a, c, g or t
  misc_feature (618)..(618): n is a, c, g or t
  misc_feature (620)..(620): n is a, c, g or t
  misc_feature (630)..(630): n is a, c, g or t
  misc_feature (658)..(658): n is a, c, g or t
  misc_feature (689)..(689): n is a, c, g or t
  misc_feature (830)..(830): n is a, c, g or t
  misc_feature (893)..(893): n is a, c, g or t
  misc_feature (927)..(927): n is a, c, g or t
  misc_feature (1142)..(1142): n is a, c, g or t
  misc_feature (1239)..(1239): n is a, c, g or t
  misc_feature (1247)..(1247): n is a, c, g or t
  misc_feature (1286)..(1286): n is a, c, g or t
  misc_feature (1292)..(1292): n is a, c, g or t
  misc_feature (1302)..(1302): n is a, c, g or t
  misc_feature (1364)..(1364): n is a, c, g or t
gagtgacatcagcaagatggcataataggaagccctggacctttcttcccttcacagacacactgattcagcaacaattcacggaaaattacctttgtgagaaatgcagaaactagttgagaggctcctgcaccctgggcgagcgcgaaaccagacccacatcaaagccggtagggagattcaggacaccctctcatcgaagtccctccccccggcwcagcgcmgtgcgatcggaaggaaaaaacccccaactcccggcttctcccaggggaggaaaagagttggttcgcacgtcaagtgccccracttttccgaggggctacccagaggactgtcttctgtcttgccwgtctcrgagctctgataggcccggcataatctagacacccgggggagaacagagatggtggtttgggctggtagatgccatagctnctcacccctgctcagcacagaacaagnagatgaaaacccccagntctcagctttcccctgaggaggaaaanagttgaatggactggaaaacagaattgaatggagcatccaacaatccagctttctgggagtgcctaaggaaccgattgcatttcaacttgtcgcgctacgctgatangattnancataccctanatgctcggcgactgcaaagaacaaaaancaggttggactagtacgaaggtttgagaggnccccaaaatctctggctaggctgatcggtgaaggtcttctcctgcataaggccagtctgtgaagactgagagaggtggctgctttgtataatgcgcagacaccaatacagagagtcaaggaaaataaagaatcagggaaanatgttccaaacaaaggaacaggataattttccagaaactgaccctaataaattggagttatanaatttacctgacgaagaattcaaaacaattgttntaaagatgctcatgaataacatgataaagatgctcaccaagatcaggaaaacaatacatgaacaaagtgagaatttcaacaaagagatagaaaatgttaaaaagtaccaaacaaaaatcatggagctgaagaatacaataactgaactgaaaaattcactagagaggttcaacagcagactagatcaagcagaagaaaggatcagtgaactcaangacaggtcattcgaaattatcgagtcagaggagcaaaaagaaaaaagaatgaaaaagagtgaagaaagcctaagggatttatgggacaccatcaagngaaccaanatacacatcatggaagtcccggaaggagaagagagaganaaaggnccagaaagcntattcgaagaaatagtgactgaaaacttcccaaatctggggaaagaaatggacatccagatncaagaagccca

SEQ ID NO: 67 - DNA, 600 bp, Homo sapiens
  repeat_region (1)..(600): l1m3de_5
  misc_feature (384)..(384): n is a, c, g or t
  misc_feature (597)..(597): n is a, c, g or t
gcacacttttccagcwgctgcctgagggtctggcttctaactagcctgcatctgggagctgatagggcagataaacaatagacctccaggagcctgaacaggaggttggcacttcccatgccttctccccagctcactccagtgataaatccaggtctacagattctccctggaaggagtttgtccacacatcaagcgccccaacttttatagcttccacccaagggactggctcctaaatcacctagctctgggagttgatggggctttgcatttatgagtctccctagaccacagagaacaaagaggtggttttaaaacaggcacacttccagcagctatctccccaggatcagagggtgcagcctgaacatgagtacaggnatttgccacagatcctctccctggcttagtgcagagagagtgggagataaacacccatgctcagcttcaccstgaagatagaagaaactggaacatacatccaacaccctaacctttccagctacatctagagagtctggtttctaccttacctgtctyagagtactracaggatatggcacatcctaatctccagggggccaccaaaaacanaga

SEQ ID NO: 68 - DNA, 750 bp, Homo sapiens
  repeat_region (1)..(750): l1m3e_5
  misc_feature (10)..(10): n is a, c, g or t
  misc_feature (192)..(192): n is a, c, g or t
  misc_feature (198)..(198): n is a, c, g or t
  misc_feature (235)..(235): n is a, c, g or t
  misc_feature (240)..(240): n is a, c, g or t
  misc_feature (255)..(255): n is a, c, g or t
  misc_feature (527)..(527): n is a, c, g or t
  misc_feature (617)..(617): n is a, c, g or t
  misc_feature (680)..(680): n is a, c, g or t
gagtgatgtnaccaaaggtagaatagaagcaagctggcttcactccccccacccacagaaaaccaaaaacaaatatacagcaccaagattatcaccagcaatatcccagaactcaaatatgaggatgagacagttcctgaggccacagagaagtaaaaaactctgagcagayagtaagagaattagacttcnatatcnacratgcccctcccccaatctgcccagcaccacatanaaaanttctcccagactcanagtttctacaytggaaaaagtgagattraggtggacaaccagcttccccaccatcttgggttccttggcaggagacctgtccctgcctcaacccatrggaagcatcaygagtgcctgaagggagaaatatycctgaggacagccagagacaaagggaggaggtaggactaccatccccagccctggaaactcggggggctgctctgtaacttggmcaaaggagacaccaaatcagagtggctgttcagcagcaccatgctgtaggaggttcnttccacaggtcccctggrcatgaacccctagccagccttcccacactgccaggatatcccctttgggacctcccccaatccgggatgggnagcactctgagagccaaggcaaacctrggcttaaggtgccatctagtgcygaaaggaggcagngacctagygaaaagaaattcaacaggtaaattacaaagaatctctaagcaaacaaaacaaaccagmcaga

SEQ ID NO: 69 - DNA, 1165 bp, Homo sapiens
  repeat_region (1)..(1165): l1m5_5
  misc_feature (94)..(95): n is a, c, g or t
  misc_feature (237)..(237): n is a, c, g or t
  misc_feature (336)..(336): n is a, c, g or t
  misc_feature (479)..(479): n is a, c, g or t
  misc_feature (544)..(544): n is a, c, g or t
  misc_feature (593)..(593): n is a, c, g or t
  misc_feature (597)..(598): n is a, c, g or t
  misc_feature (791)..(791): n is a, c, g or t
  misc_feature (793)..(794): n is a, c, g or t
  misc_feature (796)..(796): n is a, c, g or t
  misc_feature (1026)..(1026): n is a, c, g or t
  misc_feature (1031)..(1032): n is a, c, g or t
  misc_feature (1034)..(1034): n is a, c, g or t
aaagagtttcacttctagaatggcagtgtgaggagctccatagacccactccccagtgaaacaaccataactggtgaaaattatttttaaaaanncaaccatttaaagtctctggaaattgtcctaagggcatacagcaaatgaaacatttattcaagaaaatctactaaatcttagtaagaacagtgagagtctgtggtatttgagccatgactgtctcccttcttcccccccccnasccagctcagcawgatagaaactccactccaggtkggtgcagccaagaacacagggctccctctcccctcagctcccagtcaagggctatggtatctncctaggaggagcaggacatcagcatttctcatcccccccagctccatgttgcagaggctaaattccaggtgagtgtagctgagaggtcgggggctcccttcctccacccagcccccactcataggatggacttggctctaccngccaggtatggcaggctgagaatactggggccctaattacccttaccccagctcgctcatagggnagaggttccatgccaggagaggcaagccaagaagaccagaggctactrncccnncccagcacccagagcagtggctcagagattttgcccagggggagaggcaggccataagaacagagagctccaaagctctccccaaaggaactgactttatttgcaacagagtgtgaggaagttcaagcctaagggcactctcaaaaacaatggagattttggtggtaagcaattaagggaggctggtagctcnannanagyaacaagctaaaccataggccagctagtttaccagagagaaccagggaaagagacagctaagaagagccctcctggggtcagaacaaacctcaaacactgacctcaaaaaactacccctgcctraatttaattggatcagactgtggagcaatttatgccccagggattgttgaaaaacaatagagcaatcagccagcaattagtggagcctaacagctgggtgtgantacmnamngaggcagacagcttaacagagagatcagagaaagagacagtcaaagagagccctgctaaaaccactgtcatcccagggtgactgtgcacatgcccaaggctgtgccctctgaggagcaacatcagaggctt

SEQ ID NO: 70 - DNA, 2113 bp, Homo sapiens
  repeat_region (1)..(2113): l1m6_5
  misc_feature (214)..(214): n is a, c, g or t
gacatcagcaagatggcggaataggactttccagcgctcgtcctcacagaaacatcaatttgaacaactatccacgcacgaaaataccttcacaagagctaaggaaaccaggtgagagattacagyacctgggtgtagcacagaaataagaaaagacgcattgaagagggtaggaaggacagttttacattacccgcgtcacccctcccccaancccaggcagcacagcatggagagagataccctctgcttgggggaaggagagggaagtgagcacaggactttgccttggaccccaaacactaggcccgccccagtaaaacccagtactaggcaggcccccatagccccagactccaggccagtacctacggactgagccgyaccagatcccacagcccaggctccaggcctgcctggtggactcagtctccaggcctgccccagcaccaggccaaccccagtgccccaggctccagaccggccccagcaccaggccagccccagtagccccaggctccaggctgsccccagcaccaggctggcccccatagccccaggcttcaggcccaccccagcaccaggctggcccctrcagccctagtcatcaggccagcacctatagacccagcctccaggctggcccctgtagacacaggctccaggcctacccagcrccaggccagcccctgtagccccaggctccaggcccaccccaggytccagaccagcccagagccaggtyggcccacatagccccaggcttcaggcctgccccagyaccaggtcagcacccctggcctcagaccttagccaggtaccaggctggcacctgtagacacaggctccaggcctgcccagtaccaggccagtccctgtggccccaccctccagggcyagcccctgtggccccatgctccagcagacccagggttcaggcctgtcccagtagaccccagcactaggctagtccccatagacccaggctccaggactgtccctgtgtacccaggtcccagggcagcccctatggccccaggacccaggccagccctcagagacctagcctctaggccagccctgcagacccagcctccaggctggcacccayagacccaagctccaggccatcccccaggttccaggccagcctcagtagctccaggcaccaggctagcacccacagacccaggctccagactagccccacgctaccccagcaccaggccagccccaggctccaggctggtccctgtggcccaggctccagtggacccagggtccaggcctgctccagcagacccagggtccaggcccaccccagtagaccctggttccaggctagcccccatggactcaggctccaggaccacccctgcagacccaggctccaggccagccccyatggaccaggatccarggcccatytccccagttgcaggctccaggcctgccccagtgccaggccagcccccatggactcaggctccaggcccatcccagtggacccaggctccaggcccatcccagyaccaggccagcccctgyagactcaggctcaaggcccaccccagcaccaggtcagcccctgtggacccaggcttcaggccagcccctatagacacaggctccaggccyaccctcatggacccaggctccaggcccayccccacagacccaatcaacaggtccacccagtggatccaggctccaggcycaaccctgtggacccaggcaccaggcctgccacctgctgacccaggcaccaggccagcctgcctaaggactccagcagcaagcctgcctatagaccataccagatggcctgcccagaatctctggatgactggtgaagggctttcccagacaaagccagtctgcaaagactggaataagtccctacttcttcaaatgtgcagacaccaatgcaaggcccaagaatcawgaacaatcagggaaacatgacaccaccaaaggaacaaaataaatttccagtaactgaccctaaagaaatggagatctatgaactgcctgacaaagaattcaaaataattgttttaaggaagctcagtgaactwcaagaaaacacagatagacaattaaatgaaatcag

SEQ ID NO: 71 - DNA, 587 bp, Homo sapiens
  repeat_region (1)..(587): l1m7_5
tgcaaggtgaaatgaaaggacactagacagtaacttgaagccgtatgaagaaataaagatctcagtaaaggtaaatacatgggcaattataaaagctagtattattgtaacwatggtttgtaactccactttttgttttctacatgatttaaragactaatacattttttaaaaattattagtctaaaagctagtattattgtaattttggtttgtaactccattttgttttctacataatttaaaagactaatacattaaaaataattattaatttatgtttttgggcacacaatgtataaagatgtaattttgtgacatcaataactgaaaggggtggggayagagctgtaaaggcagagtttttgtatgttattgaagttaagttggtataaattcaaattagattgttataactttaggatgttaaatgtaatccccatggtaaccacaaagaaaatagctatagaatatacacaaaaggaaatgagaagggaattaaaatatttcactacaaaaaaaatcaactaaacacaaaagaagacagtaatggaggaaatgagggacaaaaaagctataaggcatat

SEQ ID NO: 72 - DNA, 1069 bp, Homo sapiens
  repeat_region (1)..(1069): l1ma10
  misc_feature (984)..(984): n is a, c, g or t
ttaatatccaaaatatataaggaactcaaacaactcaacaagaaraaaacaaataacccaattaaaaaatgggcaaargacctgaatagacatttytcaaaagaagacatacaaatggccaacagatatatgaaaaaatgctcaacatcactaatcatcaaggaaatgcaaattaaaaccacaatgagatatcacctcacacctgttagaatggctattatcaaaaagacagaaaataataaatgttggygaggatgtggagaaaagggaactattgtacactgttggtgggaatgtaaattagtayagccaytatggaaaacagtatggaggttcctcaaaaaaytaaaaataraactaccatatgatycagcaatcccactwctgggtatatatccaaargaattgaaatcagtatgtygaagagatayctgcactcccatgtttaytgcagcaytattcacaatagccaagatatggaawcaacctaagtgtccatcaayggawgaatggataaagaaaatgtggtatatatacacaatggaatactattcagccataaaaaagaatgaaatcctgtcatttgyarcaacatggatgaacctggaggacattatgctaagtgaaataagccaggcacagaaagacaaatactgcatgattccacttatatgaggtatctaaaatagtcaaactcatagaagcagagagtagaatggtggttgccaggggctgggggragggggaaatggggagttgctgttcaatgggtataaagtttcagttatgcaagatgaataagttctagagatctgctgtacaacattgtgcctatagttaataatactggattgtacacttaaaawttgttaaaagrgtagatctcatgttaagtgttcttatcgcacaacaaaaaaatggggaacttttggrrgtgatggatatgttcattatcttgattgtggtgatggtwtcacgggtgtntacatatgtcaaaactcatcaaattgtacacwttaaatatatgcagtttttagtgtataattatacctcaacaaagctgttttaa

SEQ ID NO: 73 - DNA, 1055 bp, Homo sapiens
  repeat_region (1)..(1055): l1ma2
  misc_feature (754)..(754): n is a, c, g or t
  misc_feature (769)..(769): n is a, c, g or t
ytaatatccagaatmtataaggaactcaaacaaatcaacaagaaaaaaacaaataatccmattaaaaartgggcaaaagacatgaayagacatttctcaaaagaagacatacaaatggccaacargyatatgaaaaaatgctcaacatcactaatcatcagagaaatgcaaatcaaaacyacaatgagatatcatctcaccccagttaraatggcttttattaaaaagacaaaaaataacaratgctggygaggatgtggagaaaagggaactcttayayactgttggtgggaatgtaaattagtacarccaytatggaaaacagtttggagrttyctcaaaaaactaaaaatagarctaccatatratccagcaatcccactrctgggtatatayccaaaagaaaggaaatcagtatatyaaaragatacctgcactcccatgtttattgcagcactattcacaatagchaagatttggaatcaacctaagtgtccatcaacrgatgaatggataaagaaaatgtggtacatatacacaatggagtactattcagccataaaaaagaatgaratcytgtcatttgcagcaacatggatggaactggaggtcattatgttaagtgaaataagycargmacaraaagacaaacaytgcatgttctcacttatttgtgggatctaaaaatcaaaacaattgaactcatggagatagagagtagaaggatggttaccagaggctgggaagggtagtnggaggattggggggnggkgrrgagggatggttaatgggtacaaaaaaatagttagaaagaatgaataagacctagtatttgatagcacaacaaggtgactatagtcaataataatttaattgtacattttaaaataactaaaagagtataattggattgtttgtaacacaaaggataaatgcttgaggggatggataccccattttccatgatgtgattattacacattgcgtgcctgtatcaaaacatctcatgtaccccataaatatatacacctactatgtacccacaaaaattaaaa

SEQ ID NO: 74 - DNA, 1042 bp, Homo sapiens
  repeat_region (1)..(1042): l1ma5
ttaatatccaaaatatataaggaactcaaacaactcaacaagaaraaaacaaataacccaattaaaaaatgggcaaargacctgaatagacatttytcaaaagaagacatacaaatggccaacagatatatgaaaaaatgctcaacatcactaatcatcaaggaaatgcaaattaaaaccacaatgagatatcacctcacacctgttagaatggctattatcaaaaagacagaaaataataaatgttggygaggatgtggagaaaagggaactattgtacactgttggtgggaatgtaaattagtayagccaytatggaaaacagtatggaggttcctcaaaaaaytaaaaataraactaccatatgatycagcaatcccactwctgggtatatatccaaargaattgaaatcagtatgtygaagagatayctgcactcccatgtttaytgcagcaytattcacaatagccaagatatggaawcaacctaagtgtccatcaayggawgaatggataaagaaaatgtggtatatatacacaatggaatactattcagccataaaaaagaatgaaatcctgtcatttgyarcaacatggatgaacctggaggacattatgctaagtgaaataagccaggcacagaaagacaaataccgcatgttctcactcatatgtggaagctaaaaaagttgatctcatagaagtagagagtagaatagtggttactagaggctgggaagggtagggrgaggggggratagggagaggttggttaawggrtacaaaattacagttagataggaggaataagttctagtgttctgtagcaccgtagggtgactatagttaacaayaatttattgtatattttcaaatagctagaagagaggattttgaatgttcccaacacaaagaaatgataaatgtttgaggtgatggatatgctaattaccctgatttgatcattacacawtgtatacatgtatcgaaatatcacactgtaccccataaatatgtacaattattatgtgtcaattaaaaa

SEQ ID NO: 75 - DNA, 1053 bp, Homo sapiens
  repeat_region (1)..(1053): l1ma9
  misc_feature (903)..(903): n is a, c, g or t
ttaatatccaaaatatataaggaactcaaacaactcaacaagaaraaaacaaataacccaattaaaaaatgggcaaargacctgaatagacatttytcaaaagaagacatacaaatggccaacagatatatgaaaaaatgctcaacatcactaatcatcaaggaaatgcaaattaaaaccacaatgagatatcacctcacacctgttagaatggctattatcaaaaagacagaaaataataaatgttggygaggatgtggagaaaagggaactattgtacactgttggtgggaatgtaaattagtayagccaytatggaaaacagtatggaggttcctcaaaaaaytaaaaataraactaccatatgatycagcaatcccactwctgggtatatatccaaargaattgaaatcagtatgtygaagagatayctgcactcccatgtttaytgcagcaytattcacaatagccaagatatggaawcaacctaagtgtccatcaayggawgaatggataaagaaaatgtggtatatatacacaatggaatactattcagccataaaaaagaatgaaatcctgtcatttgyarcaacatggatgaacctggaggacattatgctaagtgaaataagccaggcacagaaagacaaatactgcatgatctcacttatatgtggaatctaaaaaagtcaaaytcatagaaacagagagtagaatggtggttaccaggggctggggrakgggggaaatgggaagatgttggtcaaagggtacaaagttkcagttatgtargatgaataagttctrgagayctaatgtacagcatggtgactatagttaataatactgtattgtatacttgaaatttgctaagagagtagatyttaagtgttctcaccacanacaaatggtaactatgtgaggtgatggatatgttaattagcttgaytgtggtaatcatttcacaatgtatacatatatcaaaacatcacgttgtacaccttaaatatatacaatttttatttgtcaattatacctcaataaagctgraaa

SEQ ID NO: 76 - DNA, 932 bp, Homo sapiens
  repeat_region (1)..(932): l1mb3
ttaatatccaaaatatataaggaactcaaacaactcaacaagaaraaaacaaataacccaattaaaaaatgggcaaargacctgaatagacatttytcaaaagaagacatacaaatggccaacagatatatgaaaaaatgctcaacatcactaatcatcaaggaaatgcaaattaaaaccacaatgagatatcacctcacacctgttagaatggctattatcaaaaagacagaaaataataaatgttggygaggatgtggagaaaagggaactattgtacactgttggtgggaatgtaaattagtayagccaytatggaaaacagtatggaggttcctcaaaaaaytaaaaataraactaccatatgatycagcaatcccactwctgggtatatatccaaargaattgaaatcagtatgtygaagagatayctgcactcccatgtttaytgcagcaytattcacaatagccaagatatggaawcaacctaagtgtccatcaayggawgaatggataaagaaaatgtggtatatatacacaatggaatactattcagccataaaaaagaatgaaatcctgtcatttgyarcaacatggatgaacctggaggacattatgctaagtgaaataagccaggcacagaaagacaaatactgtatgattccacttatatgaggtacctagagtagtcaaattcatagagacagaaagtagaatggtggttgccaggggctggggggaggggggaatggggagttaktgtttaatgggtacagagtttcagtttgggaagatgaaaaagttctggagatggatggtggtgatggttgcacaacaatgtgaatgtacttaacgccactgaactgtacgcttaaaaatggttaaaatggtaaattttatgttatgtatattttaccacaattaaaaaaaaa

SEQ ID NO: 77 - DNA, 1711 bp, Homo sapiens
  repeat_region (1)..(1711): l1mb6_5
  misc_feature (213)..(213): n is a, c, g or t
  misc_feature (327)..(327): n is a, c, g or t
  misc_feature (580)..(580): n is a, c, g or t
  misc_feature (878)..(878): n is a, c, g or t
  misc_feature (965)..(965): n is a, c, g or t
  misc_feature (1224)..(1224): n is a, c, g or t
  misc_feature (1232)..(1232): n is a, c, g or t
  misc_feature (1307)..(1307): n is a, c, g or t
ggtaatgtcagcgaaaatggcggagtaaggamctccgaaaattcactcctccataaaagcaatgaaaacactggcaaaaattgtcagaatcaactttttcagaactctggaaattaaccaaaggcttacagcaatctaggaagtgtttattcaagaaaaayagctgaatctcwgtaagaacagcgagctttgtggtattttaacttgccctantcccatcccccwctctccagctcagcagtagccttgaaaataacagcttatattatggtgaaaaccagcagccaccggagkgggcagaacgggtttggagcttctcaaaagycncattcccagggaattgtcattatttgacctgtctggcggctccctggaagactccattcamagggcttgtctttatttgacctgactcagagctcactcagtgcgaamagcattatacctgggggcatttgttgaaaacawttagaggcaawtgtttaacaccacagctgcctgaggcagtgrataacagttggggcaaacaagaggctgaccaaaaagcttaaaaggaaaagctggggaatgagatgtccgnaggggctttgaaaagctccaacatattcctgggaatctagaaggccacgcgcatgcccagggctgtacacatgctcagaaaagacctaagaaggccctaagctctcacctctggctgaccttgagactctgcacaagcaggaagtgaagactaaggcagagttgtaaactgcctggctgagtgttgaaggtatgccccaacacacacacagaaccccttggcaaagamtgggagacttgttggttcmaggcatttaaggaaatctctgtccaatcattagctgaccactaagctaacngagcagagacttcagtggccacacatgacaaagaatacagactttacaaaattagttcagaaaagtcactaaacaaacagcaacaanaacacaaaagagyaacaacaaaccctggaaaggagggagaatctgatttccagagttgccacattatattatttaaaatgtccagttttcaacaaaaaattacgaggcatacaaagaaacaagaaagtatggcccatacacaggaaaaaaagcagttaatagaaactatccctgaggaagcccagacgttggacttactagacaaagactttaaatcagctattwtaaatatgttcaaagaactaaaggaaaccatgtntaaagaantaaagaaaaatatragaacgatgtctcaccaaatagagaatatcaataaagagacaaaaattataaaaaataaancaaatagaaattctggagttgaaaagtacaataactgaaataaaaagttcactagaggggtacaacagcagatttgagcwggcagaagaaagaatcagcgaacttaaagataggtcaatcgagattattcagtctgaggaacaaagaaaaaagaatgaagaaaaatgaasagagcctcagagacctgtgggacaccatcaagcgtaccaatatatgcataatgggaatcccagaaggagaagagagaaarkggcagaaagaatatttaaagraatagtggccgaaaatttcccaaatttgatgaaaaacatywayctwcayatccaagaagctcaataamctccaagtaggataaactcaaagagatccacatttasatgcatcatagtcaaactgctgaaaaa

SEQ ID NO: 78 - DNA, 922 bp, Homo sapiens
  repeat_region (1)..(922): l1mb7
cttgtatccagaatatataaagaactcttacaactcaacaataaaaaaacaaacaacccaattaaaaaatgggcaaaagatttgaatagacatttctccaaagaagatatacaaatggccaataagcacatgaaaagatgctcaacatcattagtcattagggaaatgcaaatcaaaaccacaatgagataccacttcacacccactaggatggctataattaaaaagacagacaataacaagtrttggcgaggatgtggagaaattrgaaccctcatacattgctggtgggaatgtaaaatggtgcagccactttggaaaayagtttggcagttcctcaaaaagttaaacatagaattaccatatgacccagcaattcyactcctaggtatatacccaagagaawtgaaaacatatgtccacacaaaaacttgtacacgaatgttcatagcagcattattcataatagccaaaaagtggaaacaacccaaatgtccatcaactgatgaatggataaacaaaatgtggtatatccatacaatggaatattattcagccataaaaaggaatgaagtactgatacatgctacaacatggatgaacctcgaaaacattatgctaagtgaaagaagccagacacaaaaggycacatattgtatgattccatttatatgaaatgtccagaataggcaaatccatagagacagaaagtagattagtggttgccaggggctgggggraaggggaaatggggagtgactgctaatgggtacggggtttctttttggggtgatgaaaatgttctaaaattagatagtggtgatggttgcacaactytgtgaatatactaaaaaccactgaattgtacactttaaaagggtgaattttatggtatgtgaattatatctcaataaarctataa

SEQ ID NO: 79 - DNA, 1077 bp, Homo sapiens
  repeat_region (1)..(1077): unknown
  misc_feature (690)..(690): n is a, c, g or t
  misc_feature (725)..(725): n is a, c, g or t
  misc_feature (765)..(765): n is a, c, g or t
cttgtatccagaatatataaagaactcttaaaactcaacaataaaaaaacaaacaacccaattaaaaaatgggcaaaagatctgaatagacatctcaccaaagaagatatacagatggcaaataagcacatgaaaagatgctcaacatcatatgtcattagggaaatgcaaattaaaacaacaatgagataccactacacacctattagaatggctaaaatccaaaacactgacaacaccaaatgttggcgaggatgtggagcaacaggaactctcattcattgctggtgggaatgcaaaatggtacagccactttggaagacagtttggcagtttcttayaaarctaaacatactcttaccatatgatccagcaatcayactccttggtatttacccaaatgaattgaaaacttatgtccacacaaaaacctgcacacgaatgtttatagcagctttattcataattgccaaaacttggaaacaaccaagatgtccttcaataggtgaatggataaacaaactgtggtacatccatacaatggaatattattcagcgataaaaagaaatgaactatcgagacatgaaaagacatggaggaaccttaaatgcatattgctaagtgaaagaagccagtctgaaaaggctacatactgtatgattccaactatatgacattctgaaaaaggnaaaactatggagacaagtaaaaagatcagwgattnctagagkgastrggarrgggagggaagaataggtggagcncaggggatttttagggcagcgaaactattctgtatgatactataatggtggatacatgacattatacatttgtcaaaayccatagaactgtacaayacaaagagtgaaccctaatgtaaactatggactttagttaataataatgtatcaatgttggttcatcaattgtaacaaatgtaccacattaatgcaagatgttaataatagggtaaactrttgtgtgggggagggagtatatgggaactctctgtactttctgctcaatttttctgtaaacctaaaactgytctaaaaaataaagtctattaataa

SEQ ID NO: 80 - DNA, 2487 bp, Homo sapiens
  repeat_region (1)..(2487): l1mc3
  misc_feature (848)..(848): n is a, c, g or t
  misc_feature (1194)..(1195): n is a, c, g or t
  misc_feature (1789)..(1790): n is a, c, g or t
  misc_feature (1827)..(1827): n is a, c, g or t
  misc_feature (2380)..(2380): n is a, c, g or t
cttgtatccagaatatataaagaactcttaaaactcaacaataaaaaaacaaacaacccaattaaaaaatgggcaaaagatctgaatagacatctcaccaaagaagatatacagatggcaaataagcacatgaaaagatgctcaacatcatatgtcattagggaaatgcaaattaaaacaacaatgagataccactacacacctattagaatggctaaaatcaaaaacactgacaacaccaaatgttggcgaggatgtggagcaacaggaactctcattcattgctggtgggaatgcaaaatggtacagccactttggaagacagtttggcagtttcttayaaarctaaacatacaattaccatatgatccagcaatcayactcctaggtatttacccaagtgaattgaaaacwtatgtccacacaaaaacctgcacacgaatgtttatagcagctttattcataattgccaaaacttggaaacaaccaagatgtccttcaataggtgaatggataaacaaactgtggtacatccatacaatggaatattattcagcgataaaaaggaatgaactactgakacatgaaaagacatggatgaatctyaaatgcatattgctaagtgaaagaagccagtctgaaaaggctacatactgtacgattccatttatatgacattytggaaaaggcaaaactatagagacagaaaacagattagtggttkccagrggttgagagatgggaagtggggatgrytgcaaargtaaagcacargggattttttagggtgrtaaaactattctgtataaactattctgtatgatactatggtggtggatacacgacantatgcatttgtcaaaacccacagaacttgtcaaaacccacagaactttacagcataaagagtgaactttaatgtatgyaaattttaaaaaatcatttargagatcgggggatcycaggatggaatacagamtgtgacaaaagaatctaactgtattacaaatgtatgaaacaacctcactgaagggratgggggaaaaaggtgctgacctaagtaactttggaaatgagtggagtctgtaagactaaaggcaaaaggaactgcacataagcactgtactctagttrataaagttgtttyccayaggggtayaggttaacaattctgawacyactatatacgtatannaraattaaacaaataagtaaatgtatkgtagatgatgggagccaggtttctcactgtcggagtgaggagttacagataagcaaagggaggagrctagaatgaaccctgtggtattrgattagaattggaggtatcagtatgaactcatgrtttttaatatayryryryryryryrtttcctagttctgtccgctgagagggcctagaagcaacgacaccccagtagcaatgagcacacctagcacccagatcttggtttctaataccattctccaataaaaggaaccagggctccttggagaaatggctgattctaggactagggcaggaaatatacaagatgagcctggaacatcttgcartgccagaaaataaggaagtgctcaaaaacacaatgatrggggtatgtcaaagggacacagragccaactgaaagagctcccaatggccaaagctggaacaatttgagcaacaaaataaattatrgtagtattggattataacycaaagtataaaataaatatccatgagtccatactgatataaatgaatgattaaataaataaataaattgagaagataaataagtctctnntgcagaagaatttcaaataatttatgtagatarcctnccctcaaggaagtggagcgtaactccccactccttaagtgtgggatggatatagtgacttccttccagaaagcatagtataggacggaaaaaaaagtaaatttacwgtagagaaacctgacaaacactaccttagccaggtaatcaaagttagcatcaacaattgtaagtcatgttgatagyatatacccttgatatgatgtgataagaatggcacttcacctccgtggtcttcctcccaaaaacccataaccccagtctaatcatragaaaaatatcagacaaattccaactgagggacattctacaaaatacctgaccagtactcctcaaaactgtcaaggtcatcaaaaacaaggaaagtctgagaaactgtcacagccaagaggagcctaaggagacatgacaactaaatgtaatgtggtatcctggatgggatcctggaacagaaaaaggacattaggtaaaaactaaggaaatctgaataaagtatggactttagttaataataatgtatcaatattggtttattagttgtgacaaatgtaccatantaatgtaagatgttaayaataggggaaactggatgtggggtatatgggaactctctgtactatttttgcaactttcctgtaaatctaaaactatttcaaaataaaat

SEQ ID NO: 81 - DNA, 2724 bp, Homo sapiens
  repeat_region (1)..(2724): l1mc4
  misc_feature (848)..(848): n is a, c, g or t
  misc_feature (1870)..(1870): n is a, c, g or t
  misc_feature (2054)..(2054): n is a, c, g or t
  misc_feature (2541)..(2541): n is a, c, g or t
  misc_feature (2586)..(2587): n is a, c, g or t
cttgtatccagaatatataaagaactcttaaaactcaacaataaaaaaacaaacaacccaattaaaaaatgggcaaaagatctgaatagacatctcaccaaagaagatatacagatggcaaataagcacatgaaaagatgctcaacatcatatgtcattagggaaatgcaaattaaaacaacaatgagataccactacacacctattagaatggctaaaatcaaaaacactgacaacaccaaatgttggcgaggatgtggagcaacaggaactctcattcattgctggtgggaatgcaaaatggtacagccactttggaagacagtttggcagtttcttayaaarctaaacatacaattaccatatgatccagcaatcayactcctaggtatttacccaagtgaattgaaaacwtatgtccacacaaaaacctgcacacgaatgtttatagcagctttattcataattgccaaaacttggaaacaaccaagatgtccttcaataggtgaatggataaacaaactgtggtacatccatacaatggaatattattcagcgataaaaaggaatgaactactgakacatgaaaagacatggatgaatctyaaatgcatattgctaagtgaaagaagccagtctgaaaaggctacatactgtacgattccatttatatgacattytggaaaaggcaaaactatagagacagaaaacagattagtggttkccagrggttgagagatgggaagtggggatgrytgcaaargtaaagcacargggattttttagggtgrtaaaactattctgtataaactattctgtatgatactatggtggtggatacacgacantatgcatttgtcaaaacccacagaacttgtcaaaacccacagaactttacagcataaagagtgaactttaatgtatgyaaattttaaaaaatcatttargagatcgggggatcycaggatggaatacagamtgtgacaaaagaatctaactgtattacaaatgtatgaaacaacctcactgaagggratgggggaaaaaggtgctgacctaagtaactttggaaatgagtggagtctgtaagactaaaggcaaaaggaactgcacataagcactgtactctagttrataaagttgtttyccayaggggtayaggttaacaattctgaaactattttatatgtattgtaggattgagcaaataagtaaacgcattgaagataatgggagccaggtttctcactgtcggagaagggagttacaaatatggaatgggggaagrctagaatgaaccctgtggtattrgattagaattggaggtatcagtatgaactcatgrtttttaatatayryryryryryryrtttcctagttctgtccactgagagggcctagaagcaatgacaccccagtagcaatgagcacacctagcgcccagatcttggtttctaaataccattctccactaaaaggaaccagggctccttggagaaatggctgattctaggactagggcaggaaatgtacaagatgagcctggaacatcttgctrtgccagaaaataaggaagtgctcaaaaaatgatrggggtatgtcaaaaggacacagragccagcttgaaggggctcccactggccaaatctgggacaatttgagcatcaaaataaataacggtagtaatggattataactcattgaataaaataaatatccatgagttcatactaatataaataaatgaataaaagaaataaataaataagaragaaaggaaagytcttcttacagtagaatgccaactaayaaatgtagaaggaataaaataatagaaaaatcaccatttggcaaayaccacagtaataantgtttcaggcaagaaccatcgatagatgctaaaattagtgggcgaaartttgatgagaaacgggatatttgcatagtctcaaagtatctcyccacaagatatttattaattayaaagggaaaaatagtractttacagtagagaaacctggcagacaccaccttaaccaagtgatcaaagttancatcaccaataatgagacaaattgacatcatgcgcytcctgatgtgatgcgccgagaaggacacaacatcacttctgtgatattcytgccaaaaatgcataacctgaatctaatcatragaaaatatcagacaaacccaaattgagggacattctacaaaataactggcctgtactcttcaaaaatgtcaaggtcatgaaagacaaggaaagactgaggaactgttycagattgacggaagactagagacatgacaactaaatgcaacgcgtgatcctggattggatcctggatcgagaaacggtgggagtttktayctataaaggacattattgggacaattggcgaaatttgaataaggtctgtagattagataatagtattgtatcaatgttaatttcctgattttgataattgtactgtggttatgtaagagaatgtccttgtttttaggaaatacacactgaagtatttaggggtaaarggncatsatgtctgcaacttactctcaaatggttcagraaaaaaaatnnatatayataaryagagaatgataaagcaaatgcggcaaaatgttaacaattggtgaatctgggtgaagggtatacgggwgttctttgtactattcttgcaacttttctgtaagtttgaaattatttcaaaataaaaa

SEQ ID NO: 82 - DNA, 460 bp, Homo sapiens
  repeat_region (1)..(460): mer88
  misc_feature (51)..(51): n is a, c, g or t
  misc_feature (244)..(246): n is a, c, g or t
  misc_feature (267)..(267): n is a, c, g or t
  misc_feature (272)..(272): n is a, c, g or t
  misc_feature (331)..(331): n is a, c, g or t
  misc_feature (366)..(367): n is a, c, g or t
  misc_feature (374)..(374): n is a, c, g or t
  misc_feature (400)..(400): n is a, c, g or t
  misc_feature (440)..(440): n is a, c, g or t
cactgtattgtaaattttaaaaacttcmtattttcctgatgcctcaacatncccacaaacaggctgtgagcaccccgcccaggcgaccaggtgcaccagtgtaataaggctggtccctgctacaagttccccttcttgccttcccctgactgtgacccagtgacattcaaacgcaccagtgaaatccccttacgccttktgcttgtgtsctccaccctgacccccagkaaaggcacttgcccgnnngttctctctctccctgcctcntaccngcttggttgagcccgctccctgggcactcctcccatccggccccctgcatggcatggcntgcctccctctctaggacctgtgagtataataaannctttaanttacgtctctctgagtgcaatttctntggccgtgctggagtgatccttaaagaccccaccagaggnacttccccgtttacaacaca

SEQ ID NO: 83 - DNA, 559 bp, Homo sapiens
  repeat_region (1)..(559): mer89
  misc_feature (177)..(177): n is a, c, g or t
tgagagactgaatatacaaacggacaatggccagaccatatatgaaaatagaactctgacccacaacctctgcagcaacctgcccaggaaaccaatccccttatctacaattacaacaaasaaggcagcctgctgtaagtcagacttgcasaaagtcagattgctctctctagtaancagyccaggaagccaaacaacaacctctgcaacaattggcccmaaatggccaggacttgatcaataactgmcagcttccctaatttttgtccctgcttccaacttaggaccaaccagagaaagcyaaatatgcwccccwaaccaatcacataggatgccctgcttctagttagcccgcctmcagcttccccatgccaacaacctccaatcagggcatacctgaagtcttcccttttttccactataaagctttcccactcctctgcctgcctttgagtctctgccaaacgcaagtgatggtggctgactcccttgctatagcaagctctgaataaatagcctttgcttgttctcatttggktggtcttcatttatttccaca

SEQ ID NO: 84 - DNA, 510 bp, Homo sapiens
  repeat_region (1)..(510): mer9
  misc_feature (97)..(97): n is a, c, g or t
tgttgggaacaggcccccccaaatctggccataaactggccccaaaactggccataaacaaaatctctgcagcactgtgacatgttcatgatggccntaacgcccacgctggaaggttgtgggtttactggaatgaggacaaggaacacctggcccacccaggtcggaaaaccgcttaaaggcgttcttaaaccatgaacaatagcatgagcaatctgtgccttaagggcatgttcctgctgcagataactagccagacccaccccttcatttcggcccatcccttcttttcccataagggatacttttagttaatcgagtatctatagaaacaatgctaatgactggcttgctgttaataaatacatgggtaatctctgtttggggctctcagctctgaaggctgtgaggccctgatttcccactttacacctctatatttctgtgtgtgtgtctttaattcctctagtgccactgggttaggctgtccccagtcgagctggtctcgca

SEQ ID NO: 85 - DNA, 615 bp, Homo sapiens
  repeat_region (1)..(615): mer90
  misc_feature (49)..(49): n is a, c, g or t
tgagaaagagaaaagcagcccctgacatctgagagctggcctggtaccnwcagctaggccttggtgttgctgggagctggcctggcactcacagctaggccttggtgttctcctgttgaacataaacaatttcacagaatatcaacatcagacaaggccactctgtgaccatgatggatcgagacaaaaacaagaccactccgtaatcatgtctgaacacagacaaaaacatgaacattgtccaagccacaaaaatgaccaagcatccccctctcccggctaatatgagtgactgctgcttctttaccaattacagctttagcctcgctctagtcttccctccttctagataagatttattaagatacccaatcacagaattactcccgcttcctgacagcatccaatccagagcaaagcttcgcttccttaaaccctcccccaaatcacctaacacaagcccaaatcctataataagtcctttctaacatcctcttactgagacgccccgtggttccccatggtgtgcgttctccctcgctgcarcgagcaataaacccaacttgttcaaccacaggtgtgttcctggtggtctttggctggagggcactgaca

SEQ ID NO: 86 - DNA, 196 bp, Homo sapiens
  repeat_region (1)..(196): mer91a
  misc_feature (187)..(187): n is a, c, g or t
cagggctgccatgtacagttgtgcaggttgtgcactgcacaagggcgcctggccgagggagcgagtgggggctgaaatccagcccgtgctccgctcgccaagccgtgmgtcctggtgtggggctgcgtctacctagaggaaggggcgcctttttctaattcacacaaaggcgccgtatgggctagcnctggccctg

SEQ ID NO: 87 - DNA, 184 bp, Homo sapiens
  repeat_region (1)..(184): mer91b
  misc_feature (175)..(175): n is a, c, g or t
cagggctgccatgtacagttgtgcaggttgtgcactgcacaactctagggggcgccattcacatcatagacatcacagatttgtataatgacaattttccaacagatggcagtaaagtgtcttgaggaaggggcgcctttttctaattcacacaaaggcgccgtatgggctagcnctggccctg

SEQ ID NO: 88 - DNA, 140 bp, Homo sapiens
  repeat_region (1)..(140): mer91c
cagggctgccatgtacagttgtgcaggttgtgcactgcacaactctagggggcgccattcacatcatagatctatgatgtgaatggcgccccctagagttgtgcagtgcacaacctgcacaactgtacatggcagccctg

SEQ ID NO: 89 - DNA, 412 bp, Homo sapiens
  repeat_region (1)..(412): mer92a
  misc_feature (38)..(38): n is a, c, g or t
  misc_feature (207)..(207): n is a, c, g or t
  misc_feature (218)..(218): n is a, c, g or t
  misc_feature (225)..(225): n is a, c, g or t
tgaccaagtgttcacagttgttcgcttcttaccctctncttcgccttgacagaactttagtcaggcttctctccttcctacaggcccctgaactttgcttgcccctaagcctgagcaagcactmaaatgcagaacgtgccccccttakcagcttgtcctgagaatcggctgaccacagcgggacacatttcctgtcaaaccccaccnatcatgttgtntgctcgntccccctcgcttgcccactgtcycctttctactggttctgcttaycyctccctataaaagaaaagcctttttctgtttgattttgagacgcttgcaagttcctgaggtcggagcgttctccctattgcaatagtctttttgaataaagtctctccttatctaagtccggatttgtttttatttgaca

SEQ ID NO: 90 - DNA, 636 bp, Homo sapiens
  repeat_region (1)..(636): mer92b
  misc_feature: n is a, c, g or t
  misc_feature (144)..(144): n is a, c, g or t
  misc_feature (272)..(272): n is a, c, g or t
  misc_feature (350)..(350): n is a, c, g or t
tgacaatgttgaactttacctgagccctgtgctcctggaaaacagtgawggttaagaaatccccccatccttttgtgttccgggaaacggcttactgcaaagaaccatccttccccatatgacttagataagactcatggatgncccccttgtttacctatgacaaggccagacacagaccctccaaattcccattctttgcctcataaatgattagctgaactgtttgtccccactgatcaatckggacaaaatacctgytaactcgactngaccaaactttagttaagcttctctccttcctccaggmccctgaactttggaccaccctcagcctgagccagcatcanaatgtagaacagcccctcctgagaataggctgrcctcaaggtaaracattctctgatctactctgatctcgccaccctttcatcccactcccccacacctggttctttctagccttgtttactcctccctataaaagaaaagccctttctgcctgaactttgagatgcttgcagatcttatggtcagagcgttctccctattgcaatagtccccytccccccmttgcaatagtccttttgaataaagtctctccttagctaagtccggatttgtttttatttgaca

SEQ ID NO: 91 - DNA, 554 bp, Homo sapiens
  repeat_region (1)..(554): mer92c
  misc_feature (82)..(82): n is a, c, g or t
  misc_feature (141)..(141): n is a, c, g or t
  misc_feature (172)..(174): n is a, c, g or t
  misc_feature (185)..(185): n is a, c, g or t
  misc_feature (190)..(191): n is a, c, g or t
  misc_feature (302)..(302): n is a, c, g or t
  misc_feature (407)..(407): n is a, c, g or t
tgacaatgcwgaactttacctgagccctgtgctcccggaaaacagcgatggttaagaaatccccccatccttttgtgttccnagaaacggcttaccgcaaagaactacccttccctatatgacttaaataagactctctgncccttctttctcacgacttccataagatcannnatgattccttncctgnnaagaccaaacacagacctttccccttttgcctgaacccgctgacaaggccagacacggaccctccaacttcctattctttgtttcataaatgattagctgagattagaagngtctgtccccctgaaactagctagacacagagataaacatttcctgttcagctaaccgagacttcccctgattgcaaaacaaccccccctgtaaatctccccacntgaaacctatctaccccttcctataaaagtccaaggcaaaaccaccctgccgagacacttcatagtcttcggatcttggatgctctccctattgcaatagcctgaataaaatcatctccttamttgtctagtgcattttgtctttca

SEQ ID NO: 92 - DNA, 397 bp, Homo sapiens
  repeat_region (1)..(397): mer93
  misc_feature (88)..(88): n is a, c, g or t
  misc_feature (98)..(98): n is a, c, g or t
  misc_feature (109)..(109): n is a, c, g or t
  misc_feature (206)..(206): n is a, c, g or t
  misc_feature (213)..(213): n is a, c, g or t
  misc_feature (257)..(257): n is a, c, g or t
tgttaaaataattaawtgggaggccattagactgaggtggctctagcgccctgggttcctacgtaagcaaaccgaaacctaactcagncgtttcttanaaataactatnaagaraaaatgaaacttaagctyagccaatcacaarcsgccaactaacctctgattacataaccagggacttcccacctggacagtccaaatraggngactgcncaactgtaaccaatcaaatactttatttgctctgcttcctcatncaccytataaaagcctttccttcaagcccctccggcggagccccaaaccacccgtggtctggggctgcccgattcatgaatcactgtttgctcaaataaactctttaaaattttaatgtgcctcagtttatcttttaaca

SEQ ID NO: 93 - DNA, 134 bp, Homo sapiens
  repeat_region (1)..(134): mer94
tagggtgaccatataatttatcgtccaaaccgggacacttttgagagtgaaagggggcgctattaataattacgccaggacaacaggyataaaccaggactgtcccaggcaaaccgggacatatggtcacccta

SEQ ID NO: 94 - DNA, 431 bp, Homo sapiens
  repeat_region (1)..(431): mer95
  misc_feature (314)..(315): n is a, c, g or t
tgtttaagaaaataaaaatggaggccacagtttagatataccccaaggccaaccgcccatagccacgtaaccaaaatttaagtcatcctgatttccccaaaacgctagctctaatcataaacataacacaaaacgtaagctttacatccttgtcagcgtgattcagtgaaattaaaccaatcagctatagacaaatcagcttaaacagctctacttgccctaaaaagaatgttaatgtataacagccaatcacgaaaaaggtcaaaatacttcctcctttatgctttataaactgtgctatgactgccgtragnngagcttcttaccactttcrgyttgargtctcccggttcgcgarctgtwctttctctyattgtatgcacaataaactttaaaatttttcctaacttgatctgattttawttttgaca

SEQ ID NO: 95 - DNA, 175 bp, Homo sapiens
  repeat_region (1)..(175): mer 96
cagggccgggactagggtgaggcaagtgaggcgcctagggcgcaaaatttaaggaggcactcactctcagggtcgtgcaagtgcagggtcggcatttgcacgaccctgagagtgagtgcctccttaaattttgcgccctaggcgcctcacttgcctcaccctagtcctggccctg

SEQ ID NO: 96 - DNA, 434 bp, Homo sapiens
  repeat_region (1)..(434): mer96b
  misc_feature (5)..(5): n is a, c, g or t
  misc_feature (183)..(183): n is a, c, g or t
  misc_feature (214)..(214): n is a, c, g or t
  misc_feature (284)..(284): n is a, c, g or t
  misc_feature (297)..(297): n is a, c, g or t
  misc_feature (301)..(301): n is a, c, g or t
  misc_feature (323)..(323): n is a, c, g or t
  misc_feature (359)..(359): n is a, c, g or t
  misc_feature (399)..(399): n is a, c, g or t
  misc_feature (409)..(409): n is a, c, g or t
  misc_feature (431)..(431): n is a, c, g or t
aggancagggtgagrcaagtgaggcactcgccttgggtacaaaatttaagggggtgccaaaaaactcagtaatcaagataaataatattttaatgcaatattttttttaaaatcaaaattaatgaaaaaatccatgacaaaatgtcaaaatkttaaataaagatatkatcagtatgactgatntttcattttgcctcaggctccagtatgagtngacactgcacagttrctgatcctgtatttaaaattttgatattttgttcatcatggatttttttgcattnattttgatttttnaaantattacattaaatactatgtanctwtwtwatryattcagatattatttatcttgattnctgartgttttggtacctycttaaattttgcgccygaggnragtgcctcnctcgcctcaccctagttctggntct

SEQ ID NO: 97 - DNA, 1106 bp, Homo sapiens
  repeat_region (1)..(1106): mer97
caggcagtcctcgctttgcacggttccgatatgcatgaatttcagttaccacggtttagttaaataacaccagtcccccaacaacacggttcaaatttcagttaccacggtatattaactgtgagtaattgcataaagtacaaacttcgctgctagctcttcagtccacaaatcactacataaataacagatgcgcatcatgatcagtgaccaatcacatcacttctttcaaagtctgtcggtgattggtcactgtgcatctgttattcagttcatgcacagacagcaaagcgtgtagttgtgttgcctccttgtctcccagtgataaacccacgtgacattttacaaaaatggataatcgaaagagggaattggccaacaaagatgaaagtgcagcaaagaaacgaaaagtgataatgctggaagtgaaattcgaatcaaacgtaaatggagttatagaagaaatagctgaccgtgggaatgttgacactgccgccatttgagagactctagatatgcagccagaggaacttagtgaaggcgaacttatcgacataaatgaggaaagtggttgtgacgaaaaggatgaagatgtcccagaggaagtgacgccagcaaaaaacttcacattaaaggaactcttggagatatttcacgacattgaaagcgcaaaggataaaatgttggaagctgatccaaacttagaaaggagtatgacaatttgccaaggcatagaaaagatgcttactccgtatcgtaagttatataaagaagaagaaggcaagcactgttcaaactactcttgataagttttttttggtttgttttgataagtttttttacaaagaaataaaacactttaattctcaatgtttctaatgttttaaattatagtgtactaaataaatattagttttattatttttttcattccctatacatttataaccgacggtaagagagtttttaatgtttttgacaaaaatttttaaaggtcacggaacaattataattttcccattgattattaagatcgctttgcatggtttcagcttgcatggtcatttttacggtcccgtactaccgtgcaaagcgaggactgcctg

SEQ ID NO: 98 - DNA, 787 bp, Homo sapiens
  repeat_region (1)..(787): mer99
  misc_feature (16)..(16): n is a, c, g or t
  misc_feature (102)..(102): n is a, c, g or t
  misc_feature (105)..(106): n is a, c, g or t
  misc_feature (143)..(143): n is a, c, g or t
  misc_feature (159)..(159): n is a, c, g or t
  misc_feature (223)..(223): n is a, c, g or t
  misc_feature (228)..(228): n is a, c, g or t
  misc_feature (299)..(299): n is a, c, g or t
  misc_feature (305)..(305): n is a, c, g or t
  misc_feature (389)..(389): n is a, c, g or t
  misc_feature (402)..(402): n is a, c, g or t
  misc_feature (473)..(473): n is a, c, g or t
  misc_feature (515)..(515): n is a, c, g or t
  misc_feature (591)..(591): n is a, c, g or t
  misc_feature (617)..(617): n is a, c, g or t
  misc_feature (688)..(688): n is a, c, g or t
aartcagaattcctgnaarttctyagraattytccaartcataagttattcttaaamtaytwcygtctcaaaacaaaacaaaaaaattgtaacatycttcmnacnnyttaytcattatyatrgayatctaaaaatytgtttrnttaawaacraatattnagcttagtaggatttacaaaraaytayagyytataataaatattcaaacactgaaaaacashancaaanattattgggtagtattcaaataacattcagatctcctaacaaagttasgrgacaacactacacagagtcanatgtcnaaactgccaatttaaggacttattttgcttccaaaacyyattatttcttggaataccactcataggatttgtataaagtatacnatrcatataaacntattaatatttattttatttgcaagaatgattcaccattagcagyakacarggccatgaacacatasttanaatggcaacagctacaagcaaggctgactgattaattraatngtgccacttctctcttacgtgytcctgtcctggtttctrgaaataccraccttaaccttcaactccatgtgcymanrtttyctgctcytgctttcaacttgntgtcactggattccttcaaatcagtaatgtctctatgttgattgttaagttttaatttttcagagaataanattttttcttattttcccratttttyaactgatttttcttgggattcagragaaaaatttcttaagaaatgccaggaaggaattcccacttggaaacac

SEQ ID NO: 99 - DNA, 262 bp, Homo sapiens
  repeat_region (1)..(262): mir
acagyayagcatagtggttaagagcacggrctctggagccagactgcctgggttcgaatcccggctctgccacttactagctgtgtgaccttgggcaagttacttaacctctctgtgcctcagtttcctcatctgtaaaatggggataataatagtacctacctcatagggttgttgtgaggattaaatgagttaatayatgtaaagcgcttagaacagtgcctggcacatagtaagcgctcaataaatgttrgytattatt

SEQ ID NO: 100 - DNA, 374 bp, Homo sapiens
  repeat_region (1)..(374): mlt1a
tgctatggactgaatgtttgtgtccccccaaaattcatatgttgaagccctaatccccaatgtgatggtattaggaggtggggcctttgggaggtgattaggattagatgaggtcatgagggcggggccctcataatgggattagtgcccttataaaagagaccycagagagctcccttgccccttccgccatgtgaggacacagtgagaaggcgccgtctacgaaccagggaatgagccctcaccagaaactgaatctgccggcgccttgatcttggacttcccagcctccagaactgtgagaaataaatttctgttgtttaagctacccagtctatggtattttgttatagcagcccgaacagactaagaca

SEQ ID NO: 101 - DNA, 390 bp, Homo sapiens
  repeat_region (1)..(390): mlt1b
tgttatgggctgaattgtgtccccccaaaattcatatgttgaagtcctaacccccagtacctcagaatgtgactgtatttggagatagggtctttaaagaggtaattaagttaaaatgaggtcattagggtgggccctaatccaatatgactggtgtccttataagaagaggaaattwggacacagacacgcacagaggraagrccatgtgargacacagggagaaggcggccatctrcaagccaaggagagaggcctcagaagaaaccaaccctgccgrcaccttgatctcggacttcyagcctccagaactgtgagaaaataaatttctgttgtttaagccacccagtctgtggtactttgttacggcagccctagsaaactaataca

SEQ ID NO: 102 - DNA, 466 bp, Homo sapiens
  repeat_region (1)..(466): mlt1c
tgttatgggttgaattgtgtccccccaaaattgatatgttgaagtcctaacccctagtacctcagaatgtgaccttatttggaaatagggtcwttgcagatgtaattagttaagatgaggtcatactggagtagggtgggccctaaatccaatatgactggtgtccttataaraagaggaaatttggacacagacacgcacacggggagaaggccatgtgaagacggaggcagagattggagtgatgcakctacaagccaaggaacgccaargrytgccagcaaaccaccagaagctaggaagaggcaaggaacagattctccctcacagccytcagaggarrccagccctgccgacaccttsatctcggacttctggcctccagaactgtgagagaatamatttctgttgtttaagccacscagtttgtggtactttgttacggcagcccyaggaaactaataca

SEQ ID NO: 103 - DNA, 506 bp, Homo sapiens
  repeat_region (1)..(505): mlt1d
  misc_feature (238)..(239): n is a, c, g or t
tgtggtaggcwgaataatggctccccaaagatgtccacgtcctaatccccagaacctgtgaatatgttaccttacatggcaaaagggactttgcagatgtgattaagttaaggatcttgagatggggagattatcctggattatccgggtgggcccaatgtaatcacaagggtccttawaagagggaggcagagggtcagagtcagaagaaggagatgtgacgatggaagcagrragnngaaaactcaacgttgctggctttgaagatggaggaaggggccatgagccaaggaatgcgggcagcctctagaagctggaaaaggcaaggaaacggattctcccctagagcctccagaargaacgcggccctgccgacaccttgattttagcccagtgagacycattttggacttctgacctccagaactgtaagataataaatttgtgttgttttaagccactaagtttgtggtaatttgttacagcagcmayaggaaactaataca

SEQ ID NO: 104 - DNA, 568 bp, Homo sapiens
  repeat_region (1)..(568): mlt1e
  misc_feature (228)..(231): n is a, c, g or t
  misc_feature (233)..(234): n is a, c, g or t
  misc_feature (236)..(237): n is a, c, g or t
  misc_feature (258)..(259): n is a, c, g or t
  misc_feature (398)..(398): n is a, c, g or t
  misc_feature (433)..(433): n is a, c, g or t
tgtggtaggcagaattctaaratgmtcccaatgatcctcgcctcctggcgtaatctccttgagtgtgagtaggacctgtgacttgcttctagccaacggaatatggcaaaggtgatgaratrtcacgtgattacgcgtacgtgattatgtaasattcagtctttgmcgtcattcttgccgagagactctcctsctggtyttgaagaagtaagctgccacgtcatgagnnnncnnannagarygccgcaaggcaagggnntctagagctgagagtcgcccttactgatgggcagcaagaagcaagccacctcagtcctacagccgcaaagaactgaattctgccaacaacctagtgagcttggaagcagatcctgcccagtcgagcctccagatgagancgcagccctggctgacgccttgactgcagccttgntagaccttgagcagaggacccagctaagccgtgcccagactcctgacccacagaaactgtgagataataaatgtgtgttgttttaagccgctaagtttgtggtaatttgttacgcagcaatagaaaactaacaca

SEQ ID NO: 105 - DNA, 641 bp, Homo sapiens
  repeat_region (1)..(641): mlt1e1
  misc_feature (74)..(74): n is a, c, g or t
  misc_feature (369)..(369): n is a, c, g or t
  misc_feature (376)..(376): n is a, c, g or t
  misc_feature (380)..(380): n is a, c, g or t
  misc_feature (398)..(398): n is a, c, g or t
  misc_feature (447)..(447): n is a, c, g or t
  misc_feature (555)..(555): n is a, c, g or t
tggtaggcagaattctaagatggcccccaagattcycaccccctggtatcatatrccctgtataatcccctccncttgagtgtgggcaggatctgtgaatacgatgggatatcactcctgtgattaggttacattatatggcaaaggtgaagggattttgcagatgtaattaaggttcctaatcagttgactttgagttaatcaaaagggagattatcctgggtgggcctgacctaatcaggtgagccctttaaargaggytctagaagtcagacatggaagaagtcagagagattcaaagcagcagagatgctctcctgctggccttgaagaagcaagctgccatgttttgtggagagggccatatgncagggantggngagcagcctctaggagcngaagtcctcagtcctacaaccacaaggaaatgaattctgccaacaaccngartgagcttggaagaggatcytgagcctccagatgagaaygcagccccagctaacaccttgatttcagccttgtgagaccctgagcagaggacccagctaagctgtncccagattcctgacccatagaaactgtgagataataaatttgtgttgttttaagctgctaagtttgtggtaatttgttatgcagca

SEQ ID NO: 106 - DNA, 593 bp, Homo sapiens
  repeat_region (1)..(593): mlt1e2
  misc_feature (35)..(35): n is a, c, g or t
  misc_feature (97)..(97): n is a, c, g or t
tgccctaatcctggaacctatgaatacgttacatnacatagcaaaagggattttgcagatgtaattaaggttactaaccttaaaatagggagattancctggattatctgggtgggcctaatctaatcacatgagcccttaaaagcagagagttttctccggctgatagcaggaaatgtaaagcagaagaggaagtcagagagatttgaagcatgagaagrattcgatgtaccattgctggctttgaagatggagggggccacgatgcaagaaatggaagaggcctctaggagctgagagtggctcccagctgacagccagcaaggaaatggggacctcagtcctacaaccacaaggaactgaattctgccaacaacctgaatgagcttggaagtggattcttccccagagcctccagataagagcccagcctagctgacacctttgatttcagccttgtgagaccttaagcagagaacccagttaagcctacctggacttctgacctacagaactgtgagataataaatgggtgttgttttaagctgctaaatttgtggtaatttgttacacagcaatagaaaactaataca

SEQ ID NO: 107 - DNA, 541 bp, Homo sapiens
  repeat_region (1)..(541): mlt1f
  misc_feature (179)..(179): n is a, c, g or t
tgtggtagccagcctccaagatggcccccaatgatccctgctcctggtattcacayccttgtatggtcycytcctacattgaryyagggctrgtctgtgtgaccaatagaatagggcagaagtgatggcgtgtsacttccaagaytargtcayaaawaacactgtggyttctgcyttgntctcttcgggctactcactctgggggaagccagctgccatgctatgaagacactcaagcagcctatggagaagtccacgtggsaaggaactgaggtctcctgccaacagccagcttcgacytgccagccatgtgagtgagccatcttggaagcggatcctccagccccagtyaagccttcagatgactgcagccccggctgacatcttgactgcaacctcatgagagaccctgagccagaactacccagctaagctgctcctarattcctgacccacagaaactgtgagataataaatgtttrttgttttaagccactaagttttggggtaatttgttacgcagcaatagataactaataca

SEQ ID NO: 108 - DNA, 561 bp, Homo sapiens
  repeat_region (1)..(561): mlt1f1
  misc_feature (62)..(62): n is a, c, g or t
  misc_feature (165)..(165): n is a, c, g or t
tgtccacaaattctttgatactcctcttaagaggtggagtctaattcccctccccttgaatntgggctggacttagtgacttgcttctaaccaatagaatatggcagaagtgatggtatgtgacttctaaggctaggtcataaaaggcattgywgtagcttcctncttgctctctctctctctctctcttggatcactcactctgggggaagccagctgccatgtcatgaggacactcaagcagccctgtggagaggcccatgtggcaaggaactgaggcctcctgccaacagccagcaaggaactgaggcctcctgccaacagccatgtgagtgagccatcttggaagcagatcctccagccccagtcaagccttcagatgactgcagccccagctaacatcttgactgcaacctcatgagagaccctgagccagaaccacccagctaagctgctcctaaattcctgacccacagaaactgtgagagataataaatgtttgttgttttaagccactaagttttggggtaatttgttatgcagcaatagataactaataca

SEQ ID NO: 109 - DNA, 512 bp, Homo sapiens
  repeat_region (1)..(512): mlt1g
  misc_feature (66)..(66): n is a, c, g or t
  misc_feature (279)..(279): n is a, c, g or t
tgtggcggattttaaaaatggccacaaattctttgacactcttcccatcgaggagtggggtccgtntcctctccccttgaatctgggtgggctctgtgactgcttcgaccaatagaatrcggtggaagtgatgctrtgtgacttctgagsccaggtyataaaarrcattgcagcttcctgcttgctggaackctcacacttggagtcctgagccaccacgtaagaagttcarctrccccgaggccaccatgctgtgaggaagcccaagctastccacanagagaaaccgagccatcttgraagcggatcctccagccccagtyaagycttcagatgactgcagcyccggctggcgtcttgactgcgccgataccacgtgggacagagawgaactrcccagctaagcccagcccaaattgctgacctatagtattgrgaacgaataaatgrttattgttttaagccactaagttttggggtggtttgttacgcagcartagataactgaaaca

SEQ ID NO: 110 - DNA, 379 bp, Homo sapiens
  repeat_region (1)..(379): mlt1g1
  misc_feature (329)..(329): n is a, c, g or t
tgtggcagattgtattttccaaagatggccacaacaatatctcccatcccacatgctcttctttcaatgtgacctttgccacttcttccatcaagaggtggggtctatgtcccctccccttgaatctgggcagacctttgtgactgccttgaccaatagaatatggtagaagtgatgctgtgtgacttctgaggctaggtcataaaagtgccatgcacttctgccttgctcacttgggacactcactcttggaacccagccaccatgctgtgaggaagcccaagcagcccatggagagacccgtggagaggatctgaggttcctggtcnacagccccagctgagctcccagccaacagccagcatcaacttgccagcca

SEQ ID NO: 111 - DNA, 622 bp, Homo sapiens
  repeat_region (1)..(622): mlt1g2
  misc_feature (550)..(550): n is a, c, g or t
tgtggcagattgtattttccaaagatggccacaacaatatgtcccttccacatgctttcttcaatgtgactttgacactcttcccatcaagaggtaggggtctatgtcccctccccttgaatctgggtaggcttgtgactgcttctgaccaatagagtatggtagaagtgacactgtgtgacttctgaggctaggtcataaaaggcaatgcagcttctgcctgccttgttcgctggaacactcactcttggagccctgagccaccatgtaagaagtctgactaccctgaggctaccatgctgtgaggaagccaagccacatggagaggccatgtgtaggcattctgatcaacagccctagtgtttgagtcatcccagcccaggtgccagacatgtgagtgaagaagccttcagatgattccagcccccagccattgagtcacccccagccttcgaatcttcccagctgaggccccagacatcatggagcagagacaagccatccctactgtgccctgtctgaattcctgacccacagaatctgtgagaangcataataaaatggttgttttaagccactaagttttggggtgrtttgttacacagcaatagtaactggaaca

SEQ ID NO: 112 - DNA, 547 bp, Homo sapiens
  repeat_region (1)..(547): mlt1h
  misc_feature (9)..(9): n is a, c, g or t
  misc_feature (371)..(371): n is a, c, g or t
  misc_feature (224)..(224): n is a, c, g or t
tgtggtagntgattgcaaaaatgacmccattctccacccctccctgtatccatgccctttgcaatgtgactttgcagctcctcccatcaagaggcggagtctgtttccccaccccttgaatctgggctggccwtgtgacttgctttggccaatrgaatgckgcagaagtgacggtgtgccagttccgagcctaggcctcaagaggccttgcgtgcttccgctcnctctcttggaaccctgccaccgccatgwgaacaagcccgggctagcctgctggaggatgagagaccacgtggaggagagccgagscgccccagctgaggccatcctggacmggccagcccccagccaagatcagcagagccaccaantcaaccagcagctgaccacagatgcatgagggagcccagctgagaccagaagaaccgcccagctgagcccagcccaaattgccgacccgcagaatcgtgagctaaaataaatggttgttgttttaagccactaagttttggggtggtttgttatgcagcaatagctaactgataca

SEQ ID NO: 113 - DNA, 313 bp, Homo sapiens
  repeat_region (1)..(313): mlt1h1
  misc_feature (6)..(6): n is a, c, g or t
  misc_feature (39)..(39): n is a, c, g or t
  misc_feature (43)..(43): n is a, c, g or t
  misc_feature (46)..(46): n is a, c, g or t
  misc_feature (102)..(102): n is a, c, g or t
  misc_feature (172)..(172): n is a, c, g or t
  misc_feature (182)..(182): n is a, c, g or t
  misc_feature (196)..(196): n is a, c, g or t
tgagancaccatgcttgagaggccacgtgtaggagctcnagtnranagtcctagctgagcccagccttccagccatccctaccaaggtaccagacatgtgantaaagccatcttggattgtctaggccagcccakctgccagmtgaataccactgagtgaccccagtcaatnctayatggancagaagaatcaccnagctaagccctgcccaaattcctgacccacaaaatcatgaratataataaaatggttgttgttttaagcyactaagttttgggatacttttctacacatcaatagataactggaaca

SEQ ID NO: 114 - DNA, 314 bp, Homo sapiens
  repeat_region (1)..(314): mlt1i
tggccatgtgacttgctttggccaatgaaatgtgagcagaagtgacatgtgtcacttctaggtagaagcatttaagagccagtgcgtagattcgccatrattctctttccctctgccatgagaccacaatgttccagatggaggctgctccatcagcctgggtccctgagtgaggaatgacatggagcagagccccagctgacctacaatagacatgtaacatgagtaagaaataaacctttgttgttttaagccactgagatttgggggttatttgttactgcagcataacctagcctatcctgactgataca

SEQ ID NO: 115 - DNA, 516 bp, Homo sapiens
  repeat_region (1)..(516): mlt1j
tgtggcagagactgctagttgtcccccaatatccattctccccttcttccttagtaatagaamccccaatttttagctgggcacatggccacccagaaataaagactacatttcccagcctcccttgcagctaggtgtggccatgtgactttctaagttctggccaatgagatggtaagcagaagtgatgtgtgcaacttctaggaaatgtccttaaagagaggggcaygcccttcttttccccttcctccttcctgctgcctggaatgtagatgtgatggctggagctctagcagccatcttggaccatgaggtgaaagccacatgctaaggatggcagagcagcaagatagaaggagcctgggtccctgagactatggagcagagctgccataccagccctggactgcctacctctagacttctatatgagagagaaataaattctatcttgtttaagccactgttattttgggttttctgttacttgcagctaaacctaatcctaacayacca

SEQ ID NO: 116 - DNA, 435 bp, Homo sapiens
  repeat_region (1)..(435): mlt1j1
tggctagctgttcaccaaatctgtttccttttcttcctgggcacacagctagactacatttcccagcctcccttgcagcttaggtgtggccatgtgactgagttctagccaatggaatgtaagcagaagtgatgtgtgtcacttccaggcctggcccataaaacctcccatgccatcttcctctctattctctcttctsctgcatctgctggctggatgttaacacccagggtgaccttggaagccatatgttgaagatggcagagcctccatcagcctgggtccctgaatgactgtgtggagcagagcaccactcccacccccccatcatcaattggactttacatgagcaagaaataaacttctattgtgttaagccactgagattttgagggtttatttgttacagcagctagtgttaccttaactaataca

SEQ ID NO: 117 - DNA, 417 bp, Homo sapiens
  repeat_region (1)..(417): mlt1j2
  misc_feature (110)..(110): n is a, c, g or t
  misc_feature (328)..(328): n is a, c, g or t
tgtggcagagactggctaggtgttcaccaaacccatttccttttcctcctgggcacacagctagactacatttcccagcctcccttgcagttaggtgtggccatgtgacntgagttctggccaatggaatgtgggcagaagtgatgtatrccacttccaggcctggcccataaaaccctccaatayataatcctctctctctctttcttcmtcbrctggctggatgcagagaatccaaaggactccaaggatggtagagccacaagatggaaggagcctgggtccctgagtcactacttggaggagagccactcagcagaaacacccnaccagaaacccacactgaattgtaacatgagtgagaaataaacttttattgtgttaagccactgagatttgggggtttttgttacagca

SEQ ID NO: 118 - DNA, 476 bp, Homo sapiens
  repeat_region (1)..(476): unknown
tgtggttctrgtggggctgactccaacccctagctccaggggtgggcacatgacccaggcctggccaatcagagcattccatcccyctggccacagtgattggttcagggatgggcatgtgacccaagctgggccaatgagagttctcaagccctgggacttttgctggaactattgggaaagagrtgttctttttctcctggggttgctaagctggtaggatgtaagcctggagctgctggtggtcatcttgccaccacrtggagagagcctgcctgagaatgaagccaacacagaggaaagcagagccaagagatggagagagacagattcctgatgacatcatttgagcacctggatccagccatgcctgaagccagatctatgctacccctggacttttcagttacatgagccaataaattctcttttttgcttaagcyagtttgagttgggtttcttgtcacttgyaacca

SEQ ID NO: 119 - DNA, 356 bp, Homo sapiens
  repeat_region (1)..(356): mlt1l
  misc_feature (120)..(120): n is a, c, g or t
  misc_feature (136)..(136): n is a, c, g or t
  misc_feature (159)..(159): n is a, c, g or t
  misc_feature (194)..(194): n is a, c, g or t
  misc_feature (273)..(273): n is a, c, g or t
tgaatcttgattggtctaagccaatcatggtaaatcctattccccttgccagtgattggtttaggaatgggcatgtgacacaattctggccaatgagacatgaggggaagtctgctgggngggcttctggaaaagnttttcttttttaattaaaaaatntaaagagaaaacatgtcctcttttcttgctcttgntttggatgttgttttgtgaggatgtgatgcttggagctgtggcagccatcttgcaaccatgaggcgacaagcctgagangraaagccaacacactgaggatggcagagcagaaagataaaaagaacctgggtccttgatgatatygttgagctgctgaatca

SEQ ID NO: 120 - DNA, 1338 bp, Homo sapiens
  repeat_region (1)..(1338): mlt1r
  misc_feature (533)..(533): n is a, c, g or t
  misc_feature (600)..(602): n is a, c, g or t
  misc_feature (625)..(625): n is a, c, g or t
  misc_feature (637)..(638): n is a, c, g or t
  misc_feature (642)..(642): n is a, c, g or t
  misc_feature (784)..(784): n is a, c, g or t
  misc_feature (803)..(803): n is a, c, g or t
  misc_feature (814)..(814): n is a, c, g or t
  misc_feature (1031)..(1031): n is a, c, g or t
  misc_feature (1129)..(1129): n is a, c, g or t
  misc_feature (1192)..(1192): n is a, c, g or t
gattttggcactaggaagtggggtgcttacgtaacaaatacctaaaaatgtggaagcgactttggaactgggtaataagtagaggctggaagagttttgaggtacatgytagaaaaagcctagatttccttgaagagactgttggtagaaatatggatattaaaggyaattctggtggggggctcagaaaggaagwggagagctatagagaaagctcccgtcgtcttagagaatacaaaaatcgtcatgaacagaatgttgctagaaatatgaatgttaaaggtgcttctggtgaggtctcagacggaaatgagggagatgttattgaaaattggaggaaaggtgatccttgttataaagtagcaaagaacttggctgaattgtgttcatgtcctagggctttatggaaagtagaacttgyaagtgatgaactkggatattcagctgaggaaatttctaagcaaagtgttgagggcgcaacctgacttctcctaactgcttatagtaaaatgtgagagacataaagatggaantgttgagtaaaaaggaaccagaacgtaaagatttggaaaattctcagcctgatcatgtaacagaaannncaatagcgttctctggaaagaanaccaaggatgtnnccgngcaaccgtttgctaaagagattagratcgtgactcgtgggtccaatcaaccatctcagcaraarccargaatagagatgrggttatttaggaaatatctgtggaggactctcttatctgatggctcgaacccctatgacttncataggagaccgacaaggnttttgagaatnttacaccagcagaaacactgccaacttggactraagggracagagacgagaaaaaatgaaggaagrgtggcagaccgaaggtggggctgtctcgtttcagagcatggkgtcaccccagcgggcccggaagatgaatctcaggactcagaggcattagcctccagccttaagatctaatgaagtttgccctgctgggttttggacttgcttgggaccngtgactcctttcttyyyttcyatttctcccttttggaatgggaatatctatcctatgcctgycccaccgttgtattttggaagcagataacttgtttnattrcacaggtccacagatggagaggaattttgccyctgaatgaatctyaccctgagtytctnccayacytgatgyrgrtgatatttcgctgagattgtggactaagagttggtgctggaaggggttagacattggggagatgttgctatgggatgcagggattttgcatgtgagaaggacatgattatggggggagcggagggcaaac

SEQ ID NO: 121 - DNA, 444 bp, Homo sapiens
  repeat_region (1)..(444): mlt2a1
tgtgatggttaatactgagtgtcaacttgattggattgaaggatacaaagtattgatcctgggtgtgtctgtgagggtgttgccaaaggaggttaacattggactcagtgggctggggagaggcagacccacccttaatctgrgtgggcgcmatcyaatcagctgccagcgtggctagaatataaagcaggcagaaaaatgtgaaaagagagactggcctagcctcccagcctacatctttctcccgtgctggatgcttcctgcccttgaacatcagactccaagttcttcagttttgggactcggactggctctccttgctcctcagcttgcagacggcctattgtgggaccttgtgatcgtgtgagttaatacttaataaactcccctttatatatatctattcyattagttctgtccctctagagaaccctgactaataca

SEQ ID NO: 122 - DNA, 549 bp, Homo sapiens
  repeat_region (1)..(549): mlt2a2
tgtgatggttaatattgagtgtcaacttgattggattgaaggatgcaaagtattgttcctgggtgtgtctgtgagggtgttgccaaaggagattaacatttgagtcagtggactgggagaggcagacccaccctcaatctgggtgggcaccatctaatcagctgccagcacggctagaataaagcaggcagaagaatgtggaaggagcagactkgctgagtcttctggccttcatctttctcccgtgctggatgcttcctgccctcgaacatcagactccaagttcttcagcttttggactcttggacttacaccagtggtttgccaggggctctcaggcctttggccacagactgaaggctgcactgtyggcttccctacttttgaggttttgggactcagactggcttccttgctcctcagcttgcagacggcctattgtgggacttcaccttgtgatcgtgtgagtcaatactccttaataaactcccyttcatatatacatctatcctattagttctgtccctctagagaaccctgactaataca

SEQ ID NO: 123 - DNA, 503 bp, Homo sapiens
  repeat_region (1)..(503): mlt2b2
tgtgatggttaattttatgtgtcaacttgactgggctaargggtgcccagatagctggttaaacattatttctgggtgtgtctgtgagggtgtttccagatgagattagcatttgaatcagcggactgagtaaagaagattgccctcaccaatgtgggcgggcatcatccaatccgttgagggcctgratagaacaaaaaggcagaggaagggtgaatttgctctctctccttgagctgggacatccatcttctcctgcccttggacattagaactccaggttctcgggccttcggactycgggacttgcaccagcagccccccagattctcaggccttcggactcggactgaryyacgccaccggcttccctggttctccagcttgcagacggcatatcgtgggacttctcagcctccataatcacgtgagccaattcccctaataaatcycytctatccatcctattggttctgtctctctggagaaccctgactaataca

SEQ ID NO: 124 - DNA, 450 bp, Homo sapiens
  repeat_region (1)..(450): mlt2c2
  misc_feature (260)..(260): n is a, c, g or t
tgtgatagttaattttatgtgtcaacttggctaggctatggtgtccagacgtttggtcaaacaycagtctagatgttgctgtgaaggtattttrtagatgtgattaacatttayagtcagttgactttaagtaaaggagattaccctccataatgtgggtgggcctcatccaatcagttgaaggccttaagagcaaagactgaggtttcccgaggaagaagaaattctgcctcaagactgcaacgtggaaatcctgctgntttwccagcctccaagccttcggactcgaactgcaacatcarctcttscctgggtctccagcctgccggcctaccctgcagatttcggacttgccagcctccacaatcgcgtgagccaattccttaaaataaatctctctctacacacaccctattggttctgtttctctggagaaccctgactaataca

SEQ ID NO: 125 - DNA, 388 bp, Homo sapiens
  repeat_region (1)..(388): mlt2d
  misc_feature (243)..(243): n is a, c, g or t
tgtgatagttaattttatgtgtcaacttggctaggctatggtgtccagacgtttggtcaaacattagtctgggtgtttctgtgaaggttattttttggatgagattaacatttaaatcggtagactgagtaaagcagattaccctccctaatgtgggtggacctcatctaatcagttgaaggcctgaatggaaaaaaagggctgaccctcccccaagtaagaggaaattctgcctgcctgatngtcttcgaactggaatatcagctctgcggattttggacttgccagcctccataattgcatgagccaattccttataataaatctatctactctctctacacacaccctattggttctgtttctctggagaaccctgactaataca

SEQ ID NO: 126 - DNA, 622 bp, Homo sapiens
  repeat_region (1)..(622): mlt2e
  misc_feature (26)..(26): n is a, c, g or t
  misc_feature (35)..(35): n is a, c, g or t
  misc_feature (332)..(332): n is a, c, g or t
  misc_feature (344)..(344): n is a, c, g or t
  misc_feature (389)..(389): n is a, c, g or t
  misc_feature (440)..(440): n is a, c, g or t
  misc_feature (452)..(452): n is a, c, g or t
  misc_feature (575)..(575): n is a, c, g or t
  misc_feature (608)..(608): n is a, c, g or t
tgctggattgttctgttgtcaacttngttaagctnggaactatgtttcccagaatccccttccctgtatggttctgggttagagttggccaaagatgaaattgtggaagatttggaaggcagaagtgaagcagcagccattacactctgaaggtcatcattggttasaggcagtgagagatggccagatgcagaggtgcccaggaggttccagcttgtcctcactctcccctgctcyatatccagctcttcttcctgaccactggccctgctgaccaacagcarccccaggcccaccaccagatgcttggctgcaaactcacagaggtagtngccacacagagncaacaactttccatagagttctccaccagctccccttcatggtcncacttyagcggctggatatgcttagcttcaaatttccccacaagctccagnctcattcaactncgccagagctggttagtgaccctttttctgatccttcaactcccccctccagaccttcacttccccagctcctcccacaattgtataaggtctaattcctataataaatcccttattccatanatactacatagtggctctgcttccctgactganacctgactaataca

SEQ ID NO: 127 - DNA, 661 bp, Homo sapiens
  repeat_region (1)..(661): mlt2f
tgtggtggctttgtaatgtgtcaacttggctaggctggaactacatttcccagaattcccttccctgtatrkttccaggttagggtgggccacaagagacattctgtgtgagatttggaaggcggaagtgaagcagcagccattttgttttctgtgctcggagaggtcagagtcagcaggcgctgttgcagctcacacacgttgtcgctkatctgctggctcacctcgttggcgtggggcagcagccgggcccgcagctgctccascttcccctggatcctccttcagcttctccgactcctgggccaggtgtgtgtktagctccgtgacgaagggcgccagcttctcctgcaggacacccacatcatcgaggtcggaggcagtgagagactgacatgggttccagtttgtcctcgtgggttccagctcatgcttgtgggttccagcttgtccttgctctcccccactttatatccatcttcccttcctgactgcctgccctgtggacttcaagctccagcatcagacgcaragacaacagccttacagagactgcttaaccagctcccacaattgcgtaaggtcaaatccctataataaatctcttattatatatatctcctagtggttctgcttctctgattgaaccctgactgataca

SEQ ID NO: 128 - DNA, 281 bp, Homo sapiens
  repeat_region (1)..(281): msr1
agtcaagacccccagcccctcctccctcagacccaggagtcaagaacccccagcccctcctccctcagacccaggagtcaagaacccccagcccctcctccctcagacccaggagtcaagaccccccagcccctcctccctcagactcatgagtccagacccccagcccctcctccctcagacccaggagtccagacccccagcccctcctccctcagacccaggagtccagacccccagcccctcctccctcagacccaggagtccaggccccacccctc

SEQ ID NO: 129 - DNA, 426 bp, Homo sapiens
  repeat_region (1)..(426): msta
  misc_feature (274)..(274): n is a, c, g or t
tgatatggtttggatctgtgtccccacccaaatctcatgttgaattgtaatccccaatgttggaggtggggcctggtgggaggtgattggatcatgggggcggattyctcatgaatggtttagcaccatccccttggtgctgtyctcgtgatagtgagtgagttctcatgagatctggtcgtttaaaagtgtgtggcacctcccycctctctctcttgctcctgctctcgccatgtgacgtgcctgctcccccttcgccttccgccatgattgnaagcttcctgaggcytccccagaagccgagcagatgccagcgccatgcttcctgtacagcctgcagaaccgtgagccaattaaacctcttttctttataaattacccagtctcaggtatttctttatagcaatgtgagaacagactaataca

SEQ ID NO: 130 - DNA, 465 bp, Homo sapiens
  repeat_region (1)..(465): msta1
  misc_feature (143)..(143): n is a, c, g or t
  misc_feature (227)..(227): n is a, c, g or t
tgctatagtttggatatttgtcccctccaaatctcatgttgaaatttgatccccaatttggcartgttggaggtggggcctagtgggaggtgtttgggtcatgggggcagatccctcatgaatagattaatgccctcctttgnggtgggaatgagtgagttctcactctattgtgggaatctattagttcccataagagctggttgttaaaaagagcctggcacctncctcctctctctctcttgcttgcttcctctctcaccatgtgatctctgcacacgctggctccccttccccttcaccttcygccatgagtggaagcagcctgaggccctcaccagatgcagatgctcgcaccatgctttttgtccagccagcagaaytatgagccaaataaacctcttttctttataaattacccagcctcaggtattcctttatagcaacacaaaatggactaagaca

SEQ ID NO: 131 - DNA, 1651 bp, Homo sapiens
  repeat_region (1)..(1651): mstar
gaawattggtactgaggagtggagcattgctataaagatacctgaaaatgtggaagcgactttggaactgggtaacaggcagaggttggaagagtttggagggctcagaagaagacaggaagatgagggaaagtttggaacttcttagagacttgttaaatggttgtgaccaaaatgctgatagtgatatggacagtaagggccaggctgacgaggtctcagatggaaatgaggaacttattgggaactggagcaaaggtcactcttgttatacattagcaaagagcttggctgcattttgcccctgccctagagatttgtggaagtttgaacttgagagtgatgatctagggtatctggcggaagaaatttctaagcagcaaagcgttcaagatgtgacctggctgcttttaacagcttacagtcatatgcgagagcaaagaaatcacttaaagttggaatttatatttaaaagggaagcagagcgtaaaagtttggaaaatttgcagcctggccatgtgatagaaaagaaaaacccgttttctggagagaaattcaagcaggctgcggagcgaccgtttgctaaagagattagcataactaaaaggaagccaagtgctgatagccaagacaatgggaaaaaggcctcgaaggcatttcagaaatcttcgaggtggtccttcccatcacaggcccagaggcctaggaggactgaatggtttcgtgggccaggcccagggccccgctgccctgtgcagcctcgggacactgctccctgcatcccggctgctycggctccagccgtggctcaaagggccccaggtacagctcgagctgccgcttcggagagtgcaagctataagccttggtggcttccacatggtgttaagcctgcaggtgcacagaatgcaagagtgaaggaggcttggcagcctccacctagatttcagaggatgtatgggaaatcctgggtgcccaggcagaagcctgctgcagggacggagccctcacagagaacctctactagagcagtgccaaagggaaatgtggggttggagcccccacacagagtccccaccggggcactgcctagtggagctgtgggaagggggccactgtcctccagaccccagaatggtagagccactggcagcgtgcaccgccagcctggaaaagccgcaggcatcagactccaacccgtgagagcagccacgtgggctgtgcccagcaaagccacaggggcggagctgcccaaggccttgggagcccacccctcgcaccagcgtgccctggatgcgagacacggagtcaaaggagattattttggagctttaagatttaatgactgccctgctgggtttcggacttgcgtggggcctgtagcccctttcttttggcccatttctcccttttggaatggaaatatttacccaatgcctgtaccaccattgtatcttggaagtaaataacttctttttgattttacaggctcataggtggaaggaacttgccttgtctcagatgagactttggactttggacttttgagttaatgctggaatgagttaagactttgggggactgttgggaaggcatgattgtattttgcaatgtgagaaggacgtgagatttgggggaaccaggggcagaa

SEQ ID NO: 132 - DNA, 405 bp, Homo sapiens
  repeat_region (1)..(405): mstc
  misc_feature (205)..(205): n is a, c, g or t
  misc_feature (212)..(212): n is a, c, g or t
  misc_feature (216)..(216): n is a, c, g or t
tgctacggtttgaatgtttgtcccctccaaaactcatgttgaaacttaatccccaatgtggcagtattgagagrtggggcctttragaggtgattgggtcatgagggctctgccctcatgaatggattaatggattaacgtattaatggattaattggttatcacgggagtgggatcggtggctctatcataaaarycattttgnctctcgnrtgngccccttcttgccctttcacgccttccgccatgttatgacagagcacaaggccctcaccagaaaccagatgcagccgccatgatcttggacttcccagcctscagaaccgtgagcaaaataaacctcttttctttataaattacccagtctatggtattccgttaaagcagcacgaacggactaagaca

SEQ ID NO: 133 - DNA, 630 bp, Homo sapiens
  repeat_region (1)..(630): ors1
  misc_feature (461)..(461): n is a, c, g or t
ycccatacygtttccrtcactrgtytgwgcaccctctgcarggmagacagcatgayttttyatctttgaatycyyaaaasttagctcactgtgtgctcaaacgtgtattgaatgacagttgctatatttgaggacbacatagattttggggaagacggacaggcacactagcagaaccatacgaaggccaggatcagtcatgaccagggctgcattatgacttgtgggccctgagcacttttgcttttatgggccccttcctccataaaaatattaaaaattatattttatgactgcattggtataaagatgagaatataatccaggctgaattaaaacattttcttagactctaaaatttcatttttttctgattttaaaagaaattaaaacattttyatggggccctaaagtattgtgggccctaggcactgtgcctactgtgcctaatggataagtcnagcctgaccagggcactctggtgtgaggttgaagaaaggaaatttggaacaaagaagccaagtgctctggagaagcaggtgaaacttccactgccgaacaaaatcagaatgggagcagccatggttaataaggttgtggaagtttagascttccagttcacttcmcctt

SEQ ID NO: 134 - DNA, 660 bp, Homo sapiens
  repeat_region (1)..(660): pabl_a
  misc_feature (88)..(88): n is a, c, g or t
tgtggcaggccaggtctcactaacacaggcctccataacaactgtttcagcactgactgagtggttaagttaaatattaaaagctganagagccagtgcccttatacaaaggctggaatgtaacaaaagcccaccaagagttttgcctaggcctttcctgggccttgaagcatgacaaaataacgaaggaattcttaacaggacccgtttaggattaaacaagttttactgggggtctgaagaaactccccaggcctccacaaacaagtttattgggggtctgaaggaactccccaaacctccgtgatttagcaggagacaagataagggtaatcaccccagcacctggacccatttagattaagtaaatttactgaggctccagaggaaggtcttcaggactcagaccttagttatagattagaagaagttaatcacttatgtctttagatgaatgcacacttacacgtagacatatagcttagaaggtatataagctctggaaaactttgtaattttgagttggtctggtgataatttccaggccttctccctgtaaccggttacagaaataaaaactctcttcctccccagttcatctgcatctcgttattgggccacgagaaatagcagcccgaccctcagtttggtccgggaaca

SEQ ID NO: 135 - DNA, 667 bp, Homo sapiens
  repeat_region (1)..(667): pabl_b
  misc_feature (98)..(98): n is a, c, g or t
tgtggcaggccaggtctcactaacagctgaacaggcaggcctccatgacaactgtttcagcactgactgagtggttaagttaaatattaaaagctganagagccagtgcccttatacaaaggctggaatgtaacaaaagcccaccaagagttttgcctaggcctttcctgggccttgaagcatgacaagataacgaaggaattcttaacaggacccgtttaggattaaacaagttttattgggggtctgaagaaactccccagacctccacaaacaagttttattgggggtctaaaggaactccccaaacctccatgatttagcaggagacaagataagggtaatcaccccggcacctggacccatttagattaagtaaatttactgaggctccagaggaaggtcttacaggactcagaccttagttatagattagaagttaatcacttatgtctttagatgaatgcacacttacacgtagacatatagcttagaaggtatataagctctggaaaactttgtaattttgagttggtctggtgatattttcccggccttctccctgtaaccggttacagaaataaactctcttctttcccagttcatctgcatctcgttattgggccacgagaataagcagcccgaccctcggtttggtccgggaaca

SEQ ID NO: 136 - DNA, 90 bp, Homo sapiens
  repeat_region (1)..(90): pmerl
tagagcagtggttctcaaccttcctaatgccgcggccctttaatacagttcctgtgggtcgcgacccacaggttgagaaccgctgctata

SEQ ID NO: 137 - DNA, 7756 bp, Homo sapiens
  repeat_region (1)..(7756): prima41
tctttctggcgaaccacggaagggacgatactgaagaaaccccccgaacccaaaggaaatagactgcagcactgattggacgactttgggtaagtggtgggggtatattctatacccgggtaaagaatgggattgggttagaggcccaacttaggggagttagagtctctcctaagacagagtgggttagaggcccctcttaataaaaggcaaggacgcttgaccgaccttgggttagaggcccaacttaggagggttagagtcccttctaagatttagggggttagaggcccctctcggtaaagtccctctcggctaaaaatgggtttggcactgcaggatgtttatcgctatgctctttggattaatttgccttgtcctccttgctkcmtgaatcaatttcttggttgctgtctctgtttcactgtcattttcaggagactttatttaactggtcttagggattttaacttactcttttcctatgtgcctcctgatttccgtctgtctgcttgtgaaacattgggaacaaaaagcattgaaggctctgtctctaaaattgctgattgagatttggtatttaacagctatgagcaataaaattagacagatgtggttatgttttgttgccgctatgccgactaggtgtgatcgagaagcactaggatggaaatcaggggacttttctccttgctgttttgtttcattttgcacactaaaaaaacttctttcctttcttggattcaggcaaaccggctttgcttgttcaatccacactgccgctattgcccagaacctgcttgctctggtcattcccatctaaatcctcttcatttcctttgccttatttgacatttttgtcaaagtccatgttgtggtttatctaagattcatggctcggctcacttatgttatttggataatgtgaataagggaattcaattttcagcaggttttccgtcataatgcagcgtgccttaagaactgtctcctttttgatggaacttggccaatggcaatacagtctcacgggtttggaagttttctttcaacgtcatctgcctcctttatggggaatacagcatggatcccagaggactcaccactaggatgtattcttgaacattgggacaagtttaaaccaaatggacttaagaaaagaaagttggtggtttcatataatactgtctggcctcaaattactatacttggaaaaataagaaaaatggtcaactaccagaactatggcctttaatactatacttccacttgatttgttttgtaagtgtgagggcaaatgggataaaaccaatacgttcaagcatttttattgcccagtcaaaataaaactctgcaataggtatgtgcatgtttgatgagaggaaaggaaggaaaataagaaaaagaactagacatactagatgatcctttaatgcaagcccccctccccgcccccgccaaccttggttcagcaggcagttttgggtggagcagaacctccttctgtcagctctgatggttcagatgtgttggcctcttcttctagcccctctgaaagttctgttgagaaccctttgtcccctcctccttacccgtctagtcccactctatacccaccactccctgaggaacttagcccagtgagtactactcgtagtggagcctcctatcaacttccaaagggaaatctttgtccacttagagaggtggcaaatggggaagaaggcactgtgagagtacatgttcccttttctatgtctgatttgactctatgtaaagagaagtttggtcatttctctgaagatccaggaaaattcatagatgagtttgagaaattaactctgacctataatttaacttggcaggatctgcatgttttgttgtctctgtgttgtacagtggaagagaaacaatacattttggggacagctaggacccatgcagatgaggtattggctcgtaacccgaaccataatatatatcaggcaggaggtatagcagttccagatcaagatccagagtggaactatcaaaggggcagtgaggacttggggaggagagatcatatggtcacttgtttgttggaagggatgaagaaatgtatgaaaaagcctgttaactatgaaaaggttaaggaagtttctcagggcaaagatgagaatccagctttgtttcaagggcatttagttgaggcaatcaggaaatatactaacactgatcctgcctcaagggaaggacaaacccttttgggagtacattttataacccagtctgcccctgatatccataggaaactacaaaaagcagctatgggtccccaaactcctatggaacagcttttggatatggcatttttagtttttaataacaaggacaaagcagaggaagcagaaagagcaagaaggacctcccacaaggtgcagctcttggctgcagccttaagctcacctcccacatggggttgccctcctggctcttggcctgaacaagggaagctgaaaggtgggaagcccaaagctgggcgtccgagtcaccgtgccttgggcacgaatcagtgtgcacactgtaagaaaactggccattggaagagggatttcccagtgttctgaagggagccatcggcacctgaaccaatgatggccgaaatagccaggcaagcccaagagtgatggggcctcagaccttccaccacagctcccatcggacaactagccatatctccggagaagcctcgggtaacccttgacgtggcaggtaagaatattaacttccttctggatacaagggctgcttactctgttttgacccattataatgggactctgtcaccccaaaactgtatggtcatggggatagatggacaagctcatagatgccattttacctatcctttaagctgctcttcagggactttggttttctcatatgccttttcttatcatgcctgaatgccccaccccttgttgggaagggatttgttaactcagctgcaaacagtagtatcttttggaaatcacaaggcagacaaaaaattgctccttctcctttcctgtgataagggaggaaagtcaatagggacttatctagcttgcctattgaagtaacctcccaaataaatcctgtagtatgggacattgaggttccagacaaagcattaaatgttcctctggtttgcatttagcttaagcctgatgccctgtactcctggaagagacaagatcccctaaaaccagaggcataaagagggattcatccattaagaactaagtttttgcaatttggtttgttaagaccctttaagtttccttgtaatactctaatcttgccaattaaaaagccaaatggagactatatatttgttcaagatctttgagctgtcaacagtgctgtcattcccaaacatcctgtagtactcaacccctacatgctgttagcccaggtccttggggatgcaagttggtttacagtcttagatctcagggattttttttttttctgcatttgagtataccctgattcaaaatttatctttgcttttggatggactgacccttgatagtcatttggtttctcaattaacttggatggtttttccccaggagtgtagggacagcccacatttatttggaaatacattgactagagaattaaagatgttaaaattgaataggggcactagtatttggtatgtgaatgatttgttggtagctagcccaactaaaaggggctcaaataaaaatgccattaagttgctaaattttctggacactaatgggtatagagtgtcactgcataaggcccatgtttcaactcaagaagttaaatatttaagatatgtcttaacccctggcacctgggcaatagcccccagaaaaaaaggaagtgatcttgggaatcctggaaccccaaaccagaaagcagctatgggatttcctaaggatgggaagattctgctcttaatgagtgcctggatttgggcatatggccaagtctttatgtaaggctctaaaaggagcacacgtgatctttttgaatgcagtatcaattgtaaaacatacttttaatactctcaaggagaaactgggaacaactccagccctagggatccccaatcttgataagccatttcctttatttggctgaaaaacaaggaacgctctggaagtccttgtccagaaactgggaggcatccctgaccagtagcatatttttctaagtaattagaccatgtagctttgggatggcccagatgtctcagggcagttgcagcaatggctcttttggtatatgaagccaataaactggctttgggacaacatctggaggttttgaccccacaccaagtacaaggagtactagaagctaaaagacaccagaggatgactgggggacatgtatataaatatcaggctttgttgctaaacatcctgatataactcttaaagtatgccagactttgaatccagctacctatttgcctgaacccacaggcaccctagatcattcttgcatacaagttatggagcaagtttactccagctgtccggatttaaaggatgagcctctagataatcctgaggtagaatggtttacagatggaagtagctttgtgcaccagggaaacggaaaagctgggtatgctgttgtcagtcaacatgaggtaattgaatctcaggccttaccggcttctacctcagctcaaaaggcggaattaatagctcttattagagccctgcaattgggaaaggacttaagaattaacatttccactgattctaagtatgcctttctggtacttcatgctcatgctgctatctggaaggaatggggactcctaactgctaagggttcccctataaaacatcacttagaaattcggaatctgttggacgccgttttgctgcccaaggaagtagctataatccattgcagaggtcatctgaaagggaactccagtgtgactaagggaaactcctttgcagatgcagctgctaaggccacagcattaaaggatccagttggacttgttggtatgttggtgccctcagccacggtaataacagaaccgagatatactaaagaggaacaagaatgggctaaaggtcagggtttaattcaagatccttctggctggcttatcaatgacaacaaactgttgacaccaggtgctaatcagtggaaaatagttaaacatttgcatgactctactcatttgggaagagattccctgtttcaattaatgtctcagctttttataggaaaaggcttacttaaaacagtaaagcaggtaactcaggcctgtgaactatgtgcccggaataacccaaataaccaatctttacctcctcctctagtaaggcctgttcagcacaggggaacgtaccctggtgaagactggcaaatagactatactcagatgcccccatgtaaagtgtttaagtatttattagtatttgttgacaccttttctggttggatcgaggcttttcctacctggtctgaaaaggcaattgaggtttctaaactcctactaaaggaaataattcctagatttgggctgcctaagagcttgcagagtgataatggcccatctttcacagcgacaattacccaaaacatatcttcagccctaggaattcagtaccgccttcattcagcatggaggccacagtcttcagggaaagtagaaagagctaatcaaactctaaaaaggactcttgctaaactatgccargaaacatcagaaacctggctgtctttattgcctgtggccttgttacgggtttaaatggcccctaaaggaaatctgcagctcagtccttttgaaataatgtatggaagacctttcttaactacagacttcctaatagacatagatactttcaagctacagaattatgtgatcaacttaggacaagtgcaaaacgcactccttgaatatggaaatcaaagactcccttcccccactaaggaagagaatcttgttacaacccagccgggagactgggtcctattaaaaacttggaaggaaggatccccagcagatcaactttcccccaaatggaagggatcctatcaagttctccttagtaccccaactgcagttaaacttctgggaataaacagctgggtccacttatcttgaattaaacctgtctcttatgaagtcccacaggccagtggaacacaagagactgatcccgtttattcctgtgagccaatcagtgacctctgactcctgttcagaagaaacgaaagggatgggtaacataaagatatggattggcattctacttttgggtataagttggaatcatgcagagagtaacttatttactgagtgggcacagactttagcctctctacataatcagacaaactgttgggtatgtggaaaattaccactttcctccacttccggattgccctggcatattcaaccggccaacctaagtttgtgggggactttattatgattgggaaactgaaaataataaacatacaccctctttccccatgcgctatagcttgtgtggcctaagcccatttcctctcatgcggagagacaagaaggvaccttttttttttgtctaattaggaaacagctaaattccaccccaacttaggttatactgtacagaatggacttgggtggatgacaggtatcaggcaaagcacctctatgttttgaaaggcacaataatagtcaccaccagactggaacccgtgatatgggatggttgccacctcaacaatgtaatcagacccttcttttaacagaccagatgtggatgggatggcaacataatttgccaaaaatgggtgcctacccttctccttggggatggttatgggcttgtagaactcatggctggccatacttaccttataactggactggaaggtgtatgtggggttgcccttatctcccgggatgtatcctcaccaaattggactctctgccatctaactgggaaattgtaaaggctcgccataggcgacaaaaacaagcatcttggtggttttaccccatggctatattttccccacaggcagctaccaaattavatattgagtgacaagttgaagcagcctcagccaagcacacagttgcagctttcaataatacatgccatgctgccttacccttacctaactgaggaaacttctcagattaggcaggtagccttacaaaaccgtatggctttggacattttaacagcggcccaagggggaacttgtgctttgatcaaaaccgaatgttgtgtgtatgtttcagactattcacatactattacccaggctatgaaagctttagacactcatatctctgccactgatgtgctatcagtcgaccctatatcggcttggttccaacaactgcccagttcttggaaagccttcctgtttagtttacttggaatgattttacttattttgctttgctgttgtggaatatattgcggttgtactctttgtgtaggaatgcaagacaagcttactcaatgctttcttaaattggacacttattaatcttccagatatcaccttttgtcggaactcggagttatgaacgaccctcaccataccgatgctttctgactgagctcctctctaccctgaatgcaagagaccctaatagttaggcaggaatatcatcgcccctattcagcctgaagaagttacagaagatggatcttcgtccctctgcaacccttaggattaagggtcttcttgtaaagggaggggggagata

SEQ ID NO: 138 - DNA, 630 bp, Homo sapiens
  repeat_region (1)..(630): ptr5
tgagaggtggcagtgtgctggcagccctcgcagccctcgctcactcttggctcctcctcggccttggcgcccactctggccatgcttaaggagcccttcagcctgccactgcactgtgggaacactggccaaggccagagccagctcactcagcttgtggggaagtgtggagggagaggcgcaggcgggaactggggctcgatgcggcgcttgcgggccagcgtgagttccggtggttggtggcttggcgggccccagactcggagcggctggcctgccctgctggccccaggcagtgaggggcttagcacccaggccagcagctgtggatggtgcgctgagtctcccagcagtgctggcccaccccaccagcactgcactcgatttctcgccaggccttagctgcctccccgcaggcaggccttgggacctgcagcccaccatgcctgagtctcccctgctgccgccgtgggctcctgcgtggcccaagcctccccgacgagcactgccccctgctccccggtgcctggtcccatcgaccccaagggctgaggagtgcaggtgcatgctgcgggactggcaggcagctccacctgcggccccatgcaggaagccagctgggctcctgag

SEQ ID NO: 139 - DNA, 66 bp, Homo sapiens
  repeat_region (1)..(66): r66
acagagtgctgattggtgcrtttacaaacctttagctagacacagagcgctgattggtgcgttttt

SEQ ID NO: 140 - DNA, 2030 bp, Homo sapiens
  repeat_region (1)..(2030): ricksha
  misc_feature (659)..(661): n is a, c, g or t
gggtttggatcataatcccgaaagacacaatcccaaacgccataatcccgaatgttgaaatcccgaaagatcaaaatcctaaagtctaaatccctaaagtctaaaatccctaatgtctaaaatcccgaaaatcacaatcacgaaagattaaaatctcaaatattgaaatcctgaaagccgaattctggggaagggattagtgcgttttcggttgtacgcaggatagttgcatcatgttagttgcatcatgttaggtggcagaactattaccttgttattgtctttatttggaaattaagtatggtttaaggagacacgtatgggtgccaagttgacaaggagtggacttgtggacttaattttaggtgtcaacttgactggattaaggaatacctagaaacctggtaaagcattattttgggtgtgtctgtgagggtgtttccagaggagattagtgtgtgagtctgagcggactaggcggggaagatctgccctcaatgttggcgagcaccatccaatcggccgggggcccggagagaacaaatacagaaggcgaactggtctctctctgagagctgggacagatttttcttctgctgccttggacatcagaactctgggcttgctggctttggactccaggacttacaccagtcctnnnaaccgggtcctgaggctttcggacctcagactgagagttacaccattggcttccctggttctgaggcttttggacttggactgagccatactgccggcatcccagggtctccagcttgcagacggcctgtcgtgggacttctcagccaccataatcgcgttagccaattcttctaataaattccctctcatrtatatatatatcatattggttctgtctctctggagaaccctgattaatacagatttggtattggggaagccgaatatcattccttcttactgtattccttacaacataatagaagagatctgtgaaattgttccctcacaaaaaggctgtgataaaataagtggacgaggctactcaattgtgaaagataaaatttaaaagctaattattattggtgctgcaaaagcagaaaatcacttaattacaatggccgagcaataaccagcttttaaatggacagcatatacttacaaaatttgtagaccacaaccactctgcaaatacacatgcagcaagtgtcttgaagatggcaamartgaaaattcagtttaaaaatacawsaattscctgccaaattattcaatctgtatgacttctacttctttacacaaaatttatgctatgtatttcatcttcgcatcatttccaatactggaggtataaattgtgtagagacttttagagagttctaatttgttttatgcattttttgcaaatttgactccacgaaagtgcattatcacaatgttgactttgtgtgtaagcattgtgcatgtatgtaaaaacgttgaaacttcctcaataaatgaagagatgtcctttttgtacatctgcatttgtgaaagataaaatttctcaagatcttggctctttgggcgactgcatatgcggtggtgacccatcgcggtttttgatcgatctcgtcaaaagacttaggttgttcgtcacggtatttcagatgaccgcagttataaagctgggtgcacacaattaccaaccatagtgatatgcgtttatacatttccctttttgacctatttctttatgaatacggttcgtctgctcataactgttatacccgtgcgactgtcattagtatacctgagtgtttatgcttgcaaaaatatgtatgttattattgcctattttattgtgtaaagtggcctatgaagtgttctgtcatgtttttatatgtttctcaaataaatccccttttaaaaatgtaaataaattatcttttaaagaatttttaaattttttttcagaattatattttcgggattttgatctttcgggatttcaacattcgggattatggcgtttgggattgtgtctttcgggattatgatccaaaccc

SEQ ID NO: 141 - DNA, 42 bp, Homo sapiens
  repeat_region (1)..(42): SAR
acataaaatatcaaagtacatcaaatatatattttattctgt

SEQ ID NO: 142 - DNA, 470 bp, Homo sapiens
  repeat_region (1)..(470): satrl
agggagaggatgatattactcccaatatcacagggggtgtacaccccccctgtgatattgttcctaatatccagggggggagaggatgatattactcccaatatcacagggggtgtacaccccccccccccccccsyacaccccccctgtgatattgttcgtaatatccagggggggagaggagaggatgatattactcccaatatcacagggggtgtacaccccccctgtgatattgttcgtaatatccagggggggagaggatgatattactcccaatatcacagggggtgtacaccccccctgtgatattgttcgtaatatccagggggggagaggatgatattactcccaatatcacagggggtgtacaccccccccstacvcccacmccccctgtgatattgttcgtaatatccagggggggagaggatgatattactcccaatatcacagggggtgtacacccc

SEQ ID NO: 143 - DNA, 455 bp, Homo sapiens
  repeat_region (1)..(455): sn5
cttcccttcagggacctcaaagtgaccagcttccccttgaagaatgactctccaaggcccaggagcccagcttctgggcctccaagccaggccatctggcgagggagtcggtggacgtgccctggcttcttccatgttgagttggtactacccaccaaggggggtagagaggcgagcagatgttgtctctggcctgtgtcttgttatcatggtgctgactaggcctggtacagggccctgatggggttgtcctgggtggtcacgggggtgatgagaagaagatgcagaatggattgctgtgaggatgaatgagacgactgtcagtacagacaggcacacggtgaagtgttcagggattcccctcagtagctgcccagacccaaaacctgactcctgagtcacgttactgtcccactatacgttaagaggagggaaagctgggtcgcgcaggtccc

SEQ ID NO: 144 - DNA, 1640 bp, Homo sapiens
  repeat_region (1)..(1640): sva
ctccctctccctcaccctctccccatggtctccctctccctctctttccacggtctccctctgatgccgagccgaagctggacggtactgctgccatctcggctcactgcaacctccctgcctgattctcctgcctcagcttgccgagtgcctgcgattgcaggcgcgcgccgccacgcctgactggttttcgtattttgttagtggagacggggtttcgctgtgttggccgggctggtctccagctcctaaccgcgagtgatccaccagcctcggcctcccgaggtgctgggattgcagacggagtctcgttcactcagtgctcaatgatgcccaggctggagtgcagtggcgtgatctcggctcgctacaacctccacctcccagcagcctgccttggcctcccaaagtgccgagattgcagcctctgcccggccgccaccccgtctgggaagtgaggagtgtctccgcctggccacccatcgtctgggatgtgaggagcgtctctgccctgccgcccatcgtctgagatgtggggagcacctctgcccggccgccccgtccgggatgtgaggagcgtcgctgcccggccgccccgtctgagaagtgaggagaccctctgcctggcaaccgctccatctgagaagtgaggagcccctccgcccggcagccgccctgtctgagaagtgaggagcccctccgcccagcagccacctggtccgggagggaggtgggggggtcagccccccgcccggccagccgccccgtccgggagggaggtgggggggtcagcccccagcccggccagccgccccgtccgggaagtgaggggcgcctctgcccggccgcccctactgggaagtgaggagccactttgcccggccagccactctgtccgggagggaggtgggggggtcagccccccgcccggccagccgccccgtccgggagggaggtggggggatcagccccccgcccagccagccgccccgtccgggagggaggtgggggggtcagccccccgcccggccagccgccctgtccgggaggtgaggggcgcctctgcccggccgcgcctactggaaagtgaggagcccctctgcccggccaccaccccgtctgggaggtgtgcccaacagctcattgagaaggggccatgatgacaatggcggttttgtggaatagaaaggggggaaaggtggggaaaagattgagaaatcggatggttgccgtgtctgtgtagaaagaggtagacctgggagacttttcattttgttctgtactaagaaaaattcttctgccttgggatcctgttgatcggtgaccttacccccaaccctgtgctctctgaaacatgtgctgtatccactcagggttgaatggattaagagcggtgcaagatgtgctttgttaaacagatgcttgaaggcagcatgctccttaagagtcatcaccactccctaatctcaagtacccagggacacaaacactgcggaaggccgcagggtcctctgcctaggaaaaccagagacctttgttcacttgtttatctgctgaccttccctccactattgtcctgtgaccctgccaaatccccctctgtgagaaacacccaagaatgatcaataaaaaaaaaaaaa

SEQ ID NO: 145 - DNA, 2111 bp, Homo sapiens
  repeat_region (1)..(2111): tarl
gatcaacagtgaggaggtcccacaaggctaagtggggcaagtcggggacctaaggcagtagcaggaaaaccaaagaaaacaggcggagacttgagacagaggcaggaatgtgaagaagtccaaaataaaaatccctgcacaggactcttaggctgttatcatgcactatcagcctactcctccctatttttgtacaataagctctttacactgtatttcttttcaatgaagttatcttccatctttgtactgcctcttggtgaaaagctgtcttccaagttaataactgggacatcagctctctgcagtaatagctccttttcagttttaatttgcagaactgatggggattaataactggcgctctgactttaagtggtgcaggaggcggccagtaggggacgccagccgttacgccgggagcaagagggccctgcgtagtccccatctgcctgcatgtggcgtgcagccacgacaatggcagcaagagggcccggcagtgtgcccagctgccagcaggcgggtgtgctgccactataatgtgaggaagagggccctgcaatgtccctagctgccagcaggcggcgtgccaccactatactgcgagcaagagagccctgccgtgccccggcgccagcagggggcgctggacagcactgtaagcaagagggccctgcagttgtcctagtcgccagtaggggacgcaatggcagagcaccgtgggcaagctggtcctgtagtgcccggctgcaagcagggggcgcccgaaacgggcttttcagattactcaggttccactcgtctctgcgccgccggggacgtgtgtctctgcgcgtgcaccgcgccacccccgcgctccccgcccggcggcgcgcgactgtgcgactgcaacactccccgccaccctcagcccagcgacgtgcgtctctgcgcctgcgccgcgcctcactcccgcccgctcagcgacccctcccttccggggaggcgccggcgtgcgtctacgccctgcgccgcgtctccccaacagcggcgcgcctctctgcgcctgcgccggcgcgccgcgcctctctgcgcctgcgccggcgcgccgcgcctctctgcgcctgcgccggcgccccgcgcctctctgcgcctgcgccggcgccccgcgcctctctgcgcctgcgccggcgccccgcgcctctctgcgcctgcgccggcgccccgcgcctctctgcgcctgcgccggcgccccgcgcctctctgcgcctgcgccggcgccccgcgcctctctgcgcctgcgccggcgccccgcgcctctctgcgcctgcgccggcgccccgcgcctctctgcgcctgcgccggcgccccgcgcctctctgcgcctgcgccggcgccccgcgcctctctgcgcctgcgccggcgccccgcgcctctctgcgcctgcgccggcgccccgcgcctctctgcgcctgcgccggcgccccgcgcctctctgcgcctgcgccggcgccccgcgcctctctgcgcctgcgccggcgccccgcgcctctctgcgcctgcgccggcgcgccgcctttgcgagggcggagttgcgttctctttagcacacacccggagagcatcgcgagggcggagctgcgttctcctctgcacagacttcgggggtattgcgaaggcggagcagagttcttctcaggtcagacccgggcgggcgggctgagggcactgcgagggtggagctgcgttctgttcagcacagacgtggggggcaccgtaaaggcggagcagcattcttctcagcacagacgttgggggtactgcctgcctttgggataactcggggccgcatcgagggtgaataaaatctttcccgtttgctgccctgaataatcaaggtcagagaccagttagaacggtttagtgtggaaagcgggaaacgaaaagcctctctgaatcctgcgcaccgagattctcccaaggcaaggcgaggggctgtattgcagggttcaagtgcagcgtcagaactcaaatgcagcattcctaatgcacacatgacaccctaaatataacaggcatattactcatggagggttagggttcaggttcgggttcgggttcgggttcgggtt

SEQ ID NO: 146 - DNA, 364 bp, Homo sapiens
  repeat_region (1)..(364): thelb
  misc_feature (192)..(192): n is a, c, g or t
tgatatggtttggctgtgtccccacccaaatctcatcttgaattgtagctcccataattcccacgtgtcgtgggagggacccggtgggaggtaattgaatcatgggggcgggtctttcccgtgctgttctcgtgatagtgaataagtctcacgagatctgatggttttataaaggggagttyccctgcacangctctcttgcctgccgccatgtaagacgtgmctttgctcctccttcgccttcygccatgattgtgaggcctccccagccatgtggaactgtgagtccattaaacctctttyctttataaattacccagtctcgggtatgtctttattagcagcatgagaacggactaataca

SEQ ID NO: 147 - DNA, 1580 bp, Homo sapiens
  repeat_region (1)..(1580): thelbr
gtaaattggtaccagtagagtggggcgctgctgaaaagatacccgaaaatgtggaagcgactttggaactgggtaacaggcagaggttggaacagtttggagggctcagaagaagacaggaaaatgtgggaaagtttggaacttcctagagacttgttgaatggctttgaccaaaatgctgatagtgatatggacaataaagtccaggctgaggtggtctcagatggagatgaggaacttgttgggaactggagcaaaggtgactcttgttatgttttagcaaagagactggcggcattttgcccctgccctagagatttgtggaactttgaacttgagagagatgatttagggtatctggcggaagaaatttctaagcagcaaagcgttcaagaggtgacttgggtgctgttaaaggcattcagttttaaaagggaagcagagcataaaagttcggaaaatttgcagcctgacaatgcgatagaaaagaaaatcccattttctgaggagaaattcaagccggctgcagaaatttgcataagtaacgaggagccgaatgttaatccccaagacaatggggaaaatgtctccagggcatgtcagagatcttcgcggcagcccctcccatcacaggcccggaggcctaggaggaaaaaatggtttcgtgggccaggcccagggtccccgtgctgtgtgcagcctagggacttggtgccctgcgtcccagccgctccagccatggctaaaaggggccaacgtacagctcgggccgtggcttcagagggtgcaagccccaagccttggcagcttccacgtggtgttgagcctgcgggtgcacagaagtcaagaattgaggtttgggaacctccgcctagatttcagaggatgtatggaaacgcctggatgtccaggcagaagtttgctgcaggggcggggccctcatggagaacctctgctagggcagtgcggaagggaaatgtggggtcggagcccccacacagagtccctactggggcactgcctagtggagctgtgagaagagggccaccgtcctccagaccccagaatggtagatccaccgacagcttgcaccgtgcgcctggaaaagccgcagacactcaacgccagcccgtgaaagcagccaggagggaggctgtaccctgcaaagccacaggggcggagctgcccaagaccatgggaacccacctcttgcatcagcgtgacctggatgtgagacatggagtcaaaggagatcattttggagctttaagatttgactgccccgctggatttcggacttgcatggggcctgtagcccctttgttttggccaatttctcccatttggaatggctgtatttacccaatgcctgtacccccattgtatctaggaagtaactaacttgcttttgattttacaggctcataggcggaagggacttgccttgtctcagatgagactttggactgtggacttttgagttaatgctgaaatgagttaagactttgggggactgttgggaaggcatgattggttttgaaatgtgaggacatgagatttgggaggggccaggggcggaa

SEQ ID NO: 148 - DNA, 2418 bp, Homo sapiens
  repeat_region (1)..(2418): trigger1
caggcatacctcgttttattgcgcttcgctttattgcgcttcgcagatactgcgttttttacaaattgaaggtttgtggcaaccctgcgttgagcaagtctgtcggcgccatttttccaacagcatgtgctcacttcgtgtctctgtgtcacattttggtaattctcgcaatatttcaaactttttcattattattatatctgttatggtgatctgtgatcagtgatctttgatgttactattgtaattgttttggggtgccacgaaccgcacccatataagacggcgaacttaatcgataaatgttgtgtgtgttctgactgctccaccgaccggccgttcccccgtctctctccctctcytcgggcctccctattccctgagacacaacaatattgaaattaggccaattaataaccctacaatggcctctaagtgttcaagtgaaaggaagagtmrcacatctctcactttaaatcaaaagctagaaatgattaagcttagtgaggaaggcatgtcaaaagccgagataggccaaaagctaggcctcttgcgccaaacagttagccaagttgtgaatgcaaaggaaaagttcttgaaggaaattaaaagtgctactccagtgaacacacgaatgataagaaagyaaaacagccttattgctgatatggagaaagttttagtggtctggatagaagatcaaaccagccacaayattcccttaagccaaagcctaatccagagcaaggccctaactctcttcaattctatgaaggctgagagaggtgaggaagctgcagaagaaaagtttgaagctagcagaggttggttcatgaggtttaaggaaagaagccatctccataacataaaagtgcaaggtgaagcagcaagtgctgatgtagaagctgcagcaagttatccagaagatctagctaagatcaytgatgaaggtggctacactaaacaacagattttcartgtagatgaaacagccttctattggaagaagatgccatctaggactttcatagctagagaggagaagtcaatgcctggcttcaaagcttcaaaggacaggctgactctcttgttaggggctaatgcagctggtgactttaagttgaagccaatgctcatttaccattctgaaaatcctagagcccttaagaattatgctaaatctactctgcctgtgctctataaatggaacaacaaagcctggatgacagcacatctgtttacagcatggtttactgaatattttaagcccactgttgagacctactgctcagaaaaaaagattcctttcaaaatattactgctcattgacaacgcacctggtcacccaagagctctgatggagatgtacaaggagattaatgttgttttcatgcctgctaacacaacatccattctgcagcccatggatcaaggagtaatttcgactttcaagtcttattatttaagaaatacattttataaggctatagctgccatagatagtgattcctctgatggatctgggcaaagtaaattgaaaaccttctggaaaggattcaccattctagatgccattaagaacattcgtgattcatgggaggaggtcaaaatatcaacattaacaggagtttggaagaagttgattccaaccctcatggatgactttgaggggttyaagacttcagtggaggaagtaactgcagatgtggtggaaatagcaagagaactagaattagaagtggagcctgaagatgtgactgaattgctgcaatctcatgataaaacttgaacggatgaggagttgcttcttatggatgagcaaagaaagtggtttcttgagatggaatctactcctggtgaagatgctgtgaacattgttgaaatgacaacaaaggatttagaatattacataaacttagttgataaagcagcggcagggtttgagaggattgactccaattttgaaagaagttctactgtgggtaaaatgctgtcaaacagcatcacatgctacagagaaatctttcatgaaaggaagagtcaattgatgcggcaaacttcattgttgtcttattttaagaaattgccacagccaccccaaccttcagcaaccaccaccctgatcagtcagcagccatcaacatcaaggcaagaccctccaccagcaaaaagattacgactcgctgaaggctcagatgatcgttagcattttttagcaataaagtatttttaaattaaggtatgtacattgttttttagacataatgctattgcacacttaatagactacagtatagcgtaaacataacttttatatgcactgggaaaccaaaaaattcgtgtgactcgctttattgcgatattcgctttattgcggtggtctggaaccgaacccgcaatatctccgaggtatgcctg

SEQ ID NO: 149 - DNA, 2718 bp, Homo sapiens
  repeat_region (1)..(2718): trigger2
  misc_feature (1061)..(1061): n is a, c, g or t
cagttgacccttgaacaacacgggtttgaactgcgcgggtccacttatacgcggatttttttcaataaatatattggaaaattttttggagatttgcgacaatttgaaaaaactcgcagacgaaccgcgtagcctagaaatatcgaaaaaattaagaaaaagttaggtatgtcatgaatgcataaaatatatgtagatactagtctattttatcatttactaccataaaatatacacaaatctattataaaaagttaaaatttatcaaaacttacgcacacacttacagaccgtacatggcgccattcgcagtcgagagaaatgtaaacaaacgtaaagatgcagtattaaatcataactgcataaaattaactgtagtacatactgtactactgtaataatttcgtagccacctcctgttgctattgcggtgagctcaagtgttgcgagtatccgcttaaaacgccatgtgacgctaatcatctccgcgtgagcagttcgtctctccagtaaattgcgtatcgcagtaaaaagtgatctctcgcggttctcgcgtatttttcatcgtgtttagtgcaataccgtaaaccttgaataacaccatgggacccatacgaagtgccactagtgatgctggaagtgctcccaagaagcagagaaaagtcatgacattacaagaaaaagttgaattgcttgatatgtaccgtagattgaggtctgcagctgcggttgcccgccatttcaagataaatgaatccagcataaggaccattgtaaaaaaagaaaaggaaattcgtgaagccgtcgctgcagctatgccagcaggcgcgaaaaccttgcactttttgcgaaatacctttttatctcgtattgaaaatgcagcttttatgtgggtgcaggattgctataagaaaggcatacctatagactctaatatgattcgagaaaaagcgaagtcattatatgacaacttaaagcaaaaggaaggtgaaggatctaaagctggagaatttaatgccagcaaaggatggtttgataattttagaaagaggtttggcttnaaaaatgtcaagataacaggagaagcagcttctgccgaccaagaggcagcagacgagttcccagatgccattaagaaaatcattgaggagaaaggatatctgcctgaacaggtttttaatgcagacgaaagtgccctattctggaggaaaaaaatgccacaaaggacatttattagtaaggaagagaagcaagcaccaggatttaaggcaggaagggataggctaactctactgttttgtgcaaatgcagtcgggtttatgatcaggactgcccttatctataaagctgctaacccccgagccttgaagggaaaagataaacaccagctgccagtcttttggttgtacaacaagaaggcctggacaacgagaaccctttttctggattggttccatcgatgctttgtccctgaagtcaggaagtaccttgccagtaagggactgccttttaaagttcttttgatattggacaatgcccctggccacccagaaccccatgagttcaacaccgaaggcgtcgaagtggtctacttgcccccaaacacaacgtctctaattcagcctctagatcagggggtcataaggacctttaaggctcattacacacggtactctatggaaaggattgtcaatgctatggaagagaaccccaatagagagaacatcatgaaagtctggaaggattacaccattgaagatgccatcgttgttacagaaaaagccgtgaaagccatcaagcccgaaacaataaattcctgctggagaaaactgtgtccagatgttgtgcatgacttcacaggatttacgacagagccaatcaaggaaatcatgaaagagattgtggatatggcaaaaaaggtggggggtgaagggtttcaagatatggatcttggagaaattcaagagctaatagacaccacaccagaggaattaacagaagacgacttgatggagatgagtgcttccgaaccagtgccagacgatgaggaagaagacgtagaagaagcagtgccagaaaacaaattgacattagacaatctggcagaagggttccgattattcaagactgcttttgacttcttttacgacatggacccttctatgatacgggcactgaaactaaagcaaacggtggaagaaggattggtaccatatagaaacatttttagagaaatgaaaaagcaaaaaagtcagacagaaattacgatgtatttccataaagttacaccgagtgtgcctgcctctcctgcctccccttccacctcctccacctcttccgcctctgccaccctgagacagcaagaccaacccctcctcttcctcctcctcctcagcctactcaacgtgaagacgatgaggatgaagacctttatgatgatccacttccacttaatgaatagtaaatatattttctcttccttatgattttcttaataacattttcttttctctagcttactttattgtaagaatacagtatataatacatataacatacaaaatatgtgttaatcgactgtttatgttatcggtaaggcttccggtcaacagtaggctattagtagttaagttttkggggagtcaaaagttatacgcggatttttgactgcgcggggggtcggcgcccctaacccccgcgttgttcaagggtcaactg

SEQ ID NO: 150 - DNA, 2302 bp, Homo sapiens
  repeat_region (1)..(2302): trigger5
cagatggttcccaacttacgatttttcaactttacgatggtgcgaaagcgatacgcattcagtagaaaccgtacttcgaatttctgatcttttcccaggctrgcgatatgcggtacaatactctgtcgcgatgctgggcagcgrcagtgarccgcagytcccagtcagccgcgcgatcacgagggtaaacaaccrrtaytctacagtgtaytrtrtgactggcgtttcttggacattgtgtttcgcgcttttgcatcctgtcatgtctacagtatgctcatctatgcctcctgcttctggtgagaagaagaggaaggcaattactcttgagatgaaactcaagataatcgccctgcatgaagacggcaagggattaatggccattgcacaagagttgggactttcacgatccatgatcctcaaccatcttaaagaataagaagtgaatcagtgaggcagtgaaatcgtcagcattagttaaatccactgtcacgaagaaaagagcttggctgattgataatatcgaaaaattacttgtcatgtggatgtaagaccagatatcgaagggcatactacttactgatgatgccagctagggcaagaagtgtttttgattacactaaaagagtgaatgaatgtgtcgatgatcctattatacacaagtgtttatggcaagtcataggtgattccagtgcttcaaaaggcatcataattttcttaatgtgaaggtcagcagagagtcagcaagcgctgatattgaatgtgtcaaagcttttaggaagagctgtacacgataattgtggataataaatatttcccaggacaaatattttatgtaaataaaatagggttgctctggaagcaacctgtcaagaacttaaggcattcagactgtgtattgctgcttttgggtggaaatgttgcagggttcaaattaaagcttttcctaatttacaactcagggaacccaagaacactcaagaatgtgagcaagcattcgcttcttatttattatcaccataacaagacaccctggaggacctcagcattgttcgaagactggcttttgaactgttttcttccacaggcaagagaatattgtaagcaaaaaacgacttcattcaagattcttctgatcttagacagtgctccagggcacccacagcatataggtgacatgcattcttatggaaagttatgagtttgctgccaaacacaaccacactcaactcatggaccaaggcacaatagctgcattcaaagcacactatgccaggcatttgctccggctgttgaagtgaatgaatctggctgaatgctcctagagttctggaaaagttttaacattctaaatgctatccagaatatcactggagcatggaaagaagtcacacagcaatgcatgaatggcatttggaaaaaagttttgaagacatgtgaacacattcaaaggccttagcaaggttctgctgttgatgaaacagtaacaagatactagtgcttggagaatagctagaattgatgaagaggatatttattaacttcttggcattgaatctgaagagctttccaatgaggagataatcaaactggaggaagaaagaagttgagaaagaggaagaagttatacctgaggcaccaagaaagttaacggcaaagaaactggcagagatatttgccactatcagcagtgccattcagaagttagaagaaagggatgtcattattcacaggagctgacacacagtacaggatgctcttgcttgctacagagaaatatataatgaaaaggagaacaaactgtatagtccaaacctgatgtcttcctgaagaacactatgcctgctaaaccattaacaagtatcgatgccccagtgccttctcccagctactctcaggcctcatcagaagagaaattaatgaccctgttgcagtagcatccccatcatccagcaattaattttagttcaatgcttcaaacattcttcaggcccagtatgcattcacctgtgtatgttacttaattgtgagtacccatacaaccatactgtttytyactttcagtacagtattcartaaattacatgagatattcaacactttattataaaataggctttgtgttagatgattttgcccaactgtaggctaatgtaagtgttctgagcatgtttaaggtaggctaggctaagctatgatgttcggtaggttaggtgtattaaatgcattttcgacttacaatattttcaacttacgatgggtttatcgggatgtaaccccatcgtaagtcgaggagcatctg

SEQ ID NO: 151 - DNA, 2806 bp, Homo sapiens
  repeat_region (1)..(2806): zombi
caggttgagcatccctaatccaaaaatccgaaatctgaaatgctccaaaatctgaaactttttgagcgctgacatgacgccacaagtggaaaattccacacctgaccttatgtgacgggtcacagtcaaaacgcaggtgcacaacacacagtttattcggcgtccccaagggaaaaaagaccctcccagcccccttcagctgcggtatatcttttccgcgcacacccagattcccccatgcaagcacgcccacaaagggtaataaaatggcacgtgtgcaggctggacacaccaacggcaggttccccacaatgcccccacatggggtcaagacctacgtgcattactcactgtgtttttttgcttattctctgctctgtggtgtaaagatattgttgaaaatgtcaaaaaggcctgtagatacccctgtgagtaacaatgataagaaaaaggaagcatttatgtttatctatagcacagaaaagtcaagctgttggagaaactggacagtggtgtaagtgtgaaacgtcttacagaagagtatggtgttggaatgaccaccatatatgacctgaagaaacagaaggataaactgttgaagttctatgctgaaagtgatgaacggaagttaatgaaaaataaaaaaacactgcataaagctaaaaatgaagatctcgatcgtgtattgaaagagtggatccgtcagcatcacagtgaacacatgccacttaatggtacgctgatcatgaaacaagcaaagatctgtcacaatgaactgaaaattgaagggaactgtgaatattcaacgggctggttgcagaaatttaagaaaagacacggcattacatttttaaagatttgtggtgataaagcatctgctgatcatgaagcagcggagaaattcattgacgagtttgccaagatcatcgctgatgaaaatctgatgccagaacaagtctataatgctgatgaaacatcaccgttttggtgttattgccccagaaagacactgactacagctgatgagacagcccctacaggaattaaggatgccaaggacagaataactgtgctgggatgtgctaatgcagcaggcacgcataagtgtaaacttgctgtgataggcaaaagcttgcgtccttgctgttttcaaggagtgaatttcttaccagtccattattatgctaacaaaaaggcatggatcaccagggacatcttttctgattggtttcacaaacattttgtaccagcggcttgtgctcactgcagggaagctggactggatgatgactgcaagattttgttattccttgacaactgttctgctcatcctccagctgaaattctcatcaaaaataatgtttatgccatgtactttcccccaaatgtgacttcattaattcagccatgtgaccagggtatctttagatcaatgaagagtaaatataaaaacactttcttgaacagcatgctagcagcagtgaacagaggcgtgggtgtggaaggttttcaaaaggagtttagcatgaaggatgccgtatatgctgttgccaacgcttggaacacagtgactaaagacacagttgtgcatgcctggcacaacctctggcctgcgactgtgttcagtgatgatgatgaaccaagtggtgactttgaaggattctgtatgtcaagtgagaaaaaaatgatgtctgacctccttacatatgcaaaaaatataccttcagagtccgtcagtaagctggaagaagtggatattaaagacatttttaacatcgataatgaggctccagttgttcattcattggaagaagtggatatcaaagaagtcttccacatcgataaatgcattaccagttgttcaaccatcaccggatggtggaatagccgaaatggttctgaatcaaggtgattgtgatgatagtgatgatgaagatgatgacgttaacactgcagaaaaagcgcctatagatgacatggtgaaaatgtgtgatgggcttattgaaggactagagcagcgtgcattcataacagaacaagaaatcatgtcagtttataaaatcaaagagagacttctaagacaaaaaccattgttaatgaggcagatgactccggaggaaacattttaaaaagccatccagcagaatgcctcctcatccctagaggacccacttcctggtccctcaactgcttctgatgtttcttctcacttagaaaacaaaaaccaaaaagcaaaaaaaatacagtgtacagtaaccttttaatcaaaacacagcatcgtagatggagactgaaagcctgccattgtttgttgttgctgttgtttaacagctgatacaggtattctggtgatgctactgtgctgcttagttaccctgaacacatttttttttcactgtattaatggtatgtcatattttttactgttaagtacttatgtgtgaataagtgtaagaaaatgattgcttatcggtagcatataaattcagagtcaggaatgatggtgatgccaaacaaccacagattgtccacatgggtggctgagatagtgacacctttgctttctgatggttcaatgtacacaaactttgtttcatgcacaaaattattaaaaatattgtataaaattaccttcaggctatgtgtataaggtatatatgaaacataaatgaattttgtgtttagacttgggtcccatccccaagatatctcattatgtatatgcaaatattccaaaatctggaaaaaaatccagaattcaaacacttctggtcccaagcatttcggataagggatactcaacctg

SEQ ID NO: 152 - DNA, 234 bp, Homo sapiens
  repeat_region (1)..(234): zombi_a
caggttgagcatcccaaatccgaaaatccgaaatccgaaatgctccaaaatccgaaactttttgagcgccgacatgacgctcaaaggaaatgctcattggagcgttttggatttcggattttcagatttgggatgctcaaccggtaagtataatgcaaatattccaaaatccaaaaatccgaaatccgaaacacttctggtcccaagcattttggataagggatactcaacctg

SEQ ID NO: 153 - DNA, 468 bp, Homo sapiens
  repeat_region (1)..(468): zombi_b
  misc_feature (145)..(147): n is a, c, g or t
  misc_feature (149)..(149): n is a, c, g or t
  misc_feature (153)..(154): n is a, c, g or t
  misc_feature (157)..(157): n is a, c, g or t
  misc_feature (159)..(159): n is a, c, g or t
  misc_feature (166)..(166): n is a, c, g or t
  misc_feature (169)..(169): n is a, c, g or t
  misc_feature (177)..(177): n is a, c, g or t
  misc_feature (182)..(182): n is a, c, g or t
  misc_feature (187)..(187): n is a, c, g or t
  misc_feature (198)..(198): n is a, c, g or t
  misc_feature (200)..(200): n is a, c, g or t
  misc_feature (210)..(210): n is a, c, g or t
caggttgagcatccctaatctgaaaatccgaaatccaaaatgctccaaaatctgaaactttttgagcaccaacatgatgccacaagtggaaaattccacacctgacctcatgtgataggtcacagtcaaaayacaatcaagactnnncnagcnnctncngttgctnttnctgccagncaacnacagnttgtgcacctngntggcaraganactgacacatttgctttctkatggttcagtgtacacaaactttgtttcatgcacaaaattatttaaaatattgtataaaattaccttcaggctatgtgtataaggtgtatatgaaacataaatgaatttcgtgtttagacttgggtcccatccccaagatatctcattatgtatatgcaaatattccaaaatccaaaaaaatctgaaatccaaaacacttctggtcccaagcatttcggataagggatactcaacctg

SEQ ID NO: 154 - DNA, 333 bp, Homo sapiens
  repeat_region (1)..(333): zombi_c
caggtccacaatcccttatctacaattctaaaatccaaaaagctctgaaaactaaaagtttttttataatttgaaactcatttggcagcaaaacctgacctgaactgatatgaggctatttatagtctttatttatcccacttagtgtgaatattcatatatttcactgcagaaatattaatgtgtttgattatagggtgctgccccagaccccactgggggtgttatataatatatagtatatgcactatattacctttctaaaatctaaaaaattctgaattctgaaacacatctggccccaaggatttcagataagggattgtggacctg

SEQ ID NO: 155 - DNA, 290 bp, Homo sapiens
  repeat_region (1)..(290): mer35
gatgtggcgtttgagtggacacgggggaagaaacaagtaatatgaataacatggtgagacagaaagagttgtggacagagctgtgggaaatatgagagataaggagagagatactgaaaagagcgttaagagagatgaagatagggtgtctggcccatgaaggccctcgtgaagagcaatgctgaatagatgaatgaacctcaatgcccagcagtggtgggatgaaaaggggatcctgtgcagaaaccacactacccatcagagaagcaactctgctcgtttccccttga

SEQ ID NO: 156 - DNA, 693 bp, Homo sapiens
  repeat_region (1)..(693): mer39
  misc_feature (57)..(57): n is a, c, g or t
  misc_feature (63)..(63): n is a, c, g or t
  misc_feature (79)..(79): n is a, c, g or t
  misc_feature (83)..(83): n is a, c, g or t
  misc_feature (144)..(144): n is a, c, g or t
  misc_feature (151)..(151): n is a, c, g or t
  misc_feature (161)..(161): n is a, c, g or t
  misc_feature (193)..(193): n is a, c, g or t
  misc_feature (209)..(210): n is a, c, g or t
  misc_feature (230)..(230): n is a, c, g or t
  misc_feature (477)..(477): n is a, c, g or t
  misc_feature (610)..(610): n is a, c, g or t
  misc_feature (628)..(629): n is a, c, g or t
  misc_feature (659)..(659): n is a, c, g or t
  misc_feature (683)..(685): n is a, c, g or t
cataattccgggttctcagctcctataagccttgctgtttcctgagtgactaaaacnataagnatatcttttgttgaantatntggctttttgtccttggttcatgtagcagctttggaacagcttcagagcggtaaaggtganggacagncttttgttanaatgttggggcgctctaagcctcagaagcagncctcagraaacagaanntcattttctgaccttctctngccctctaatcwtymcccgcctttctgtcttrgrgctgsccgtaaagaaattwtctgacctatctcgtctgatwgtaggtcataagaccctcattccagaaggggtcccgccctatacccgggaggaaggaatgccgcacagakagaccaagaagaatacgaacagacaagccttgctgggttyccacacycagtytatkaccattagatcatwccccttttgtcyaatcacatttctgcgcagctntccattcttcatcaaatctaarcataaaaatagagttttccctgagtmtttgkgtcttcatttctgaaggctcycatgtcacataaaactttgattaaataaatctrttatgcttttctcttgctaacctrtnttttattataggagtgtnngccgtgacccttatgatgggtagggaaggnatcacacctttctgcccctacagnnntaatgccc

SEQ ID NO: 157 - DNA, 581 bp, Homo sapiens
  repeat_region (1)..(581): mer39b
  misc_feature (321)..(321): n is a, c, g or t
tggttggggctcagaaaacaataccgcaaaatgaaggcctcagaagcaaartttttctctgaccttctcccgccctcctgtctctcagtcccattctcccctccccgaggctagccatagaaactagaatctctcttccccaaggcaggtcatagaaaccagaacycctttcctscaaagccagccataaaacctaaaaatattactctaactttccctccacctttctgtgtaaaaactggccataaagaaattatctgacctaccttgtttgattgtaggtcataagacccccattccagagagggccccgccctatanccggaaggaatgcgtgctcagagaagccaagaagaatctagacagacaggccttgctgggtttccccactcagctcattagcattrgatcatrgcctttttgtccagtcatatttctacacggctgtccattctttgttgaacctaagcataaaaatggacaattttccctgtatctttgggtcttcattctgaaggctcccgtgtatacagtgtatacatgttarataaatgtatatgcttttctccattattctgctt

SEQ ID NO: 158 - DNA, 554 bp, Homo sapiens
  repeat_region (1)..(554): mer41a
tgtcagagacgtgtgaaccagagcaactccatcttgaataggagctgggtaaaatraggctgaracctactgggctgcattcccagacggttaaggcattctaagtcacaggatgagataggaggtcggcacaagatacaggtcataaagaccttgctgataaaacaggttgcagtaaagaagccggcyaaaacccaccaaaaccaagatggccacgagagtgacctctggtcgtcctcactgctacactcccaccagcaccatgacagtttacaaatgccatggcaacgtcaggaagttaccctatatggtctaaaaaggggaggcatgaataatccaccccttgtttagcatatcatcaagaaataaccataaaaatrggcaaccagcagccctcggggctgctctgtctatggagtagccattcttttattcctttactttcttaataaacttgctttcactttactctrtggactcgccctgaattctttcttgcacragatccaagaaccctctcttggggtctggatcgggacccctttcttgtaaca

SEQ ID NO: 159 - DNA, 635 bp, Homo sapiens
  repeat_region (1)..(635): mer41b
tgtcagaggcgtttgaaccagagcaactccatcttgaataggcgctgggtaaaatraggctgaracctactgggctgcattcccagacggttaaggcattctaagtcacaggatgagataggaggtcggcacaagatacaggtcataaagaccttgctgataaaacaggttgcagtaaagaagccggcyaaaacccaccaaaaccaagatggccacgagagtgacctctggtcgtcctcactgctcattatatgytaattataatgcattagcatgctaaaagacactcccaccagcaccatgacagtttacaaatgccatggcaacgtcaggaagttaccctatatggtctaaaaaggggaggaaccctcagttccgggaattgcccgcccctttcctkgaaaaytcatgaataatccaccccttgtttagcatataatcaagaaataaccataaaaatrggcaaccagcagccctcggggctgctctgtctatggagtagccattcttttattcctttactttcttaataaacttgctttcactttactctrtggactcgccctgaattctttcttgcacragatccaagaaccctctcttggggtctggatcgggacccctttcttgtaaca

SEQ ID NO: 160 - DNA, 554 bp, Homo sapiens
  repeat_region (1)..(554): mer41c
tgtcagaggcgttcgaaccagagcgactccatcttgaatgagggctaggaaaatgaggctgagmcttgctgggctgcattcccagraagtcaggcattcctaacctctagatgtttacggttaagggaacagattaataatgtttactaaacagacccagacttgggagtgtccagatatcccgatatctkgagaacagaggcattcctaatttckctttaaagataataatattgattcttgcaaaakatagtaattaagcaaagatkrrcaatcctttgtcacaagcccttgtagcagagcacatctcccccgtaatgttctttggctttgttatcctatatataaacaagcattgtacctagggtggacgcsttcctcctsttgctttcgggaacgccctgctctgtctatggagtagccgttctttcactmctttactttcttaataaacttgctttyactttacactgtggaatcaccctgaattctttcttgcatgagatccaagaaccctctcttggcggttggatcaggacccctttcttgtaaca

SEQ ID NO: 161 - DNA, 557 bp, Homo sapiens
  repeat_region (1)..(557): mer41d
  misc_feature (407)..(407): n is a, c, g or t
tgttagggaagcaggagcctaggagagccagagtgacaccattttaaaatcaactccatcttaaaactagcaaggcacattccttgccagtcacgacccatggtcctaagatgtttacagttgaggaagcagcttgawaatacctacaaggacacactcctacaacaacagaaagtccagatgtcccaatacccataacaatatatgctttcaagataattatagtcatgctttgatgtacttacgcactaaaatgtcaaagatagttttctttaaatcaatatamtaataaattttgtcatgctgtcagcccacccgcacgtaggcacagcttagtttagtctttacatagacaagactcctatataagaaaagtttaagacagagatggcgcgttcctccgcctnctttccggggacgccctactctgtaatggagtagtttttaataaacttgctcttctcactgtactccgcaactcgccttgaattccttcctgtgcgagatccaagaaccctctcttagggtctggatcgggacccctttttctggtaaca

SEQ ID NO: 162 - DNA, 512 bp, Homo sapiens
  repeat_region (1)..(512): mer41e
tgaaatagctgcataagctatgggccgataagaccctgaaaaaccagggtgtggaccaagctggctaagactgactggacccaacatggtgctggatttgacctaggtttcacctaggacctcattatatgctcattaacatactaaatcacacacccaccagcaccatgacagttccgggaacacccatatttggtgtaaaaatgggtggcaccacagttctgagaaatcttcacctttttccaggaatcttcatgaatattccaccccttggttaaagaaacccataaaggtagaagccccaaacccymttggcgcaactcwctctcttgagtatgcccgcactcccctttcttgagtgtgtacttttcgctttgcaataaatctccgtactttcactattttctgactcatccttgaattccttctcgcgatggtgtcaagagcctggacaccggctggggtcgasgtcccaccggcgtttggggacctcccccagcccaccggtatca

SEQ ID NO: 163 - DNA, 3943 bp, Homo sapiens
  repeat_region (1)..(3943): mer41i
  misc_feature (855)..(855): n is a, c, g or t
  misc_feature (988)..(988): n is a, c, g or t
  misc_feature (1113)..(1113): n is a, c, g or t
  misc_feature (1197)..(1197): n is a, c, g or t
  misc_feature (1465)..(1465): n is a, c, g or t
  misc_feature (1473)..(1473): n is a, c, g or t
  misc_feature (2318)..(2323): n is a, c, g or t
  misc_feature (2617)..(2617): n is a, c, g or t
  misc_feature (2941)..(2941): n is a, c, g or t
  misc_feature (2993)..(2993): n is a, c, g or t
  misc_feature (3136)..(3136): n is a, c, g or t
  misc_feature (3408)..(3408): n is a, c, g or t
  misc_feature (3413)..(3413): n is a, c, g or t
  misc_feature (3421)..(3421): n is a, c, g or t
  misc_feature (3518)..(3519): n is a, c, g or t
  misc_feature (3650)..(3650): n is a, c, g or t
tctttctggcaaccacagaagggactacagtgcagaaaccctcaacccaaaggctaactttgagtaagtgatagggtcctgtaacatctttctggcaaacccaaaaggacaatactgaagaaacctcccaatgcaaaggaaatagactacatcattgataggccgaccttgggcaagtggtggggtacccaggtaaaagatgggattgggttagaggcccaatttagggaagtttgggtctctgctaagacagactgggttaaaggcccctcttaataaatggcaaggatgcttgaccaaacttggtttagagggccaacttaggagggttagagtccttcctaagatttaaggggttagaggcccctctcagtaaagtccctcatggttaagaacgggtttggcactaagggatgttaactgccattctctttggattaatctgtgttgcactctttgctgatggctatgggtgacaggattaggcatgtgatcctgtgatcacgggacatgaggagctttttcttccctaaaaggggaaacttcagagctgctgggcctgctggaaaagatcccttctcaactgacaagtgaccgcctgaacttttgattcagtgtctgctgcaatgggcaggtctttctctggtctccctgagcgccttgccttccccaccctgccataagcagtgcttttctcccttccctttccyctctctstctgtgcaaaccggttaaacraacgataaaaatcactgtttatctcctctgtaaagttttrattaatrgaaaaaaggatttttgaggctagtcttaagctgtagcgaatctggtgtrctttgtgtgtctttctgtatngttctgtcataaaraggggtaccttaggatagaacgcwggctkaggacmcycgtaagctcactgttcaacccagcccagcaaactggtcagttataaattttgctgcaggtccctgaaacaacaacaaaaaantggatgaggtttccctcccatcttgttttatgtccttggragcttgaccttgtaaccatgtggcgrtrctttcgcttggyctctgccatcacaatggcgtcccgggttcaggrttcwattcctgnctcagrrgatgagtttctttatattcttctgtctatgtatttatatgtgttgtgtgtrtgtgatgtttatatatraaagagctntrattaattggcttaaaraataagaagagcttaaatcaaatattttgtcagaaaartaraargtstartgccttttagttcacgtgactttagtaatctttgrkaaataaagacagtttaaagattattgrtaaaataaaaatgtcttcaaaayttaatktaracatttggtctraattagrcaggtcagatactatstctactagatgytttaaggtcataaactgcttctatgacttttgataatttttyaacttgcytgctttanagccattngattctaggtaaggcctggggacatgtggagttagccacgtcccctagctatgctggagagtcagactttatctgcgcttctgcctggtgtgtccaaggctaggctccacacctagtacataattaaaatcacttactaaccaggtttttcaccaaaagtaaaagttcttaagagttaacattgtaacatgtaattaagactactaaagaaacagttccacaagtaagtcctataaggaaagtgaaatgtgtttttggttaaaaaaaaattataagaagtcacgggagtatgagttttctttactttgcctaaagggttagaggattattttaagttagatagaataaagctgaaggtttaagcaagttgtggaaggtttatttaaaaaattaattgtaagagattttgtgtgtgaatatattggctaaagttgaaaaggcattattcagtttttccataaattaaacattggaataaaagcaaaacaggtttttgttagagcaaaaacctgcttatgacctgctttttaacaaacatttgtaaaggattataaaaggtttatgagaatgttaccttatggtcaaacattaaaattgggtagatatgtctataaggttttattaagaattgggtttgacatcaataatacactaatgcaacagtgacatttggctgatttagtataaaagtcatagaggaagcatcatcaaatatgaaatggtgtttggctttctttgggctgtatttgtataaatgtgtcattggtacatgttccaaaattattttaaaaaaaacttctttaaccctgatatgacttagtgtatgctattaataattgttatgnnnnnntaaattattgcgtgccacagaggtaacaaattttccttgtcaattgtgtctttaactgtggctgtcctaagactttttgtcatccatagacaattgttgtcttgttttggtcctctttagaaggtggtttataatcagctgtagaactctaacaggtgctcttaaatgcaggtttctgataactttggagattgtgacattagaacggaggaaaaacattcaggactcatgaagagctgaaatrttcatgaatatcaagcagaacagggagttaactgcatggactgaactaanagaagtctaacgtgtaaaacgttgctgatcctttgttttgtttttcagagtcaaggaaactttttcttttgagctatttacagcttttagcaattgagtaaagtatactyctgtgaacaaaatttggagcatrtttgtttctctctacctgatttctccagaatttggaaactattcgtgagtattctcaatttatggcaatatagttatttgcataagtgcaataagaatctgttytctttagtaacaggacacaattggagaaattggttattttaccaaggctttgactggaatggcatacttccctttaaggaatcaaanttgacttrycgagccgataaaagccccttggggaatctgrcctcataccttnttcayacgcagtccctgtacagggttcctgacctgtggtaagtaaagaatgtcactttctracaggcccagrarccccaagttatyttgrgacctcaagaggagaggaatttacycaactcataggtatttgakggtacaaanccatggctgggctcagctttaaaaaagtcttatccgagattccttctatgaaacaaagttccatcaaagccaattttaaaagcctatgtgaaaaataattattcttgctgcactktatacaaataatyaggccaagtataataaarcaaaycggtcctaccatgatttgtctttaryaaaaatggraaactggagagagaaaaattatgtttcaaaacctatagtacacytgttgttarattctartcttrcctaatgtttttcagttkttnttatnttctrcantttagactaactctacttattcctgtgaaccaaccagtgatctctggctgcwgctcagaagaaacaagrartgatgggtaatataaaaatccggatnntattctaattctgggcacgtattggaatcggctaacaaccccatatcagcttggttccaatagttgcccagttcatggaaagccttctaatttagtttacttgggataattttgcttattttgctttactnttgtggaatatattgctgttgtactctttgtgtaggaatgcaggataagcttactraatgttttcttaaaycgaacccttattcctcttccagggtaccatcttttgttgggaactcagttacaaataaccctcaccataccagtactttctggaatgagctcctcttctaccctggagggcaagagaccataatagtcaggcagaaatatcattgcccctattcagcctgaagaagttacagaagatgaatctttgtccttctacaaccttaggattaagggttcttttata

SEQ ID NO: 164 - DNA, 333 bp, Homo sapiens
  repeat_region (1)..(333): mer44a
cagtagtccccccttatccgcgggggatacgttccaagacccccagtggatgcctgaaaccacagatagtaccgaaccctatatatactatgttttttcctatatatatatacctatgataaagtttaatttataaattaggcacagtaagagattaacaataactaataaaatagaacaattataacaatataccgtaataaaagttatgtgaatgtggtctctttctctcaaaatatcttattgtactgtactcacctattttcggaccgcggttgaccatgggtaactgaaactrcggaaagtgaaaccgcggataaggrgggactactg

SEQ ID NO: 165 - DNA, 719 bp, Homo sapiens
  repeat_region (1)..(719): mer44b
  misc_feature (160)..(160): n is a, c, g or t
  misc_feature (263)..(263): n is a, c, g or t
  misc_feature (502)..(502): n is a, c, g or t
  misc_feature (689)..(689): n is a, c, g or t
cagtagtccctccttatccatgggggatatgttccaagacccccagtggatgcctgaaactrtggatagtacygaacyctatatatactatgttttttccyatacatacttatgataaagtttaatttataaattaggcacagtaagagattaacaatantaactaataataaaatagaacaattataacaatatactgtaataaaagttatgtgaatgtggtctctctctcaaaatatcttattgtactgtactcacccttnttcttcttgtgatgatgtgagatgataaaatgcctatgtgatgagatgaagtgaggtgaatgatgtaggcattgtgatgtagcgttaggctactattgaccttctgatgtctgatgatatgtcagaaggaggatcatctgcttcaggtgatcctggatcattgagccatgacaatgtcgatggttggatgtcaggagcagacaatgtcgatgactaatgggtggrtagcatatacagcntggatacgctggacaaagggatgattcacgtcccaggtrggatggagcaggacagtgtgagatttcasccatcatgctactcagaacaatacacaatttaaaacttatgaattgtttatttctggaattttccatttaatattttcagaccacagttgacyatgggtaactgaaaccacagaaagtnaaaccayrgataagggagaactactgtaca

SEQ ID NO: 166 - DNA, 728 bp, Homo sapiens
  repeat_region (1)..(728): mer44c
  misc_feature (523)..(523): n is a, c, g or t
  misc_feature (640)..(640): n is a, c, g or t
cagtagtccccccttatccacgggggatacgttccaagacccccagtggatgcctgaaaccacggatagtaccgaaccctattgctatcagtcttttggaacatgtttctgttcatgtcttctgcccacaaatttaatgcctcttccacctcaactaaacacgtatcatgcactccggccatcacttttgcagtttgaggtatgacatcaaaactagcatgaatttatttttccttcttcacaattccaaagatggaagattctttcttaccgtagatcttagcaacctcagcatacgattatttttcytttctttttaagtcaagaactttcaccttttcgcttaaaggaagcactttacagcttctytttggcatgtccgaattgccaccaacactactcttgtgcttttgggccattattaagtaaaacgggagttacttgaacacaagcactgtgataccaagacagtcggtctgataactgagatggctactaagtgattaacaggcaggtagcgtanacggcgtggatacgctggacaaagggatgattcacatcccggatgggacggcgcgaaatttcatcacgctactcagaacggcgcgyaatttaaaacttatgaattgtttatttctgnaattttcaatttaatattttcggaccgcagttgaccacgggtaactgaaaccacagaaagtraaaccacggataaggggggactgctg

SEQ ID NO: 167 - DNA, 178 bp, Homo sapiens
  repeat_region (1)..(178): mer45
caggaccggctacataatttgcgggrcccagtgcaaaatgaaaatgcggggccccttgttcaaaaattattaagaatttcaagacggcgacagcagagcattaaaccaagcacggggcccttctragcgcggggccctgtgtgactgcacaggtcgcacgcccatgaagccggccctg

SEQ ID NO: 168 - DNA, 1037 bp, Homo sapiens
  repeat_region (1)..(1037): mer45b
  misc_feature (495)..(495): n is a, c, g or t
caggaccggctacataatttgcggggcccagtgcaaaatgaaaatgcggggtcccttgttcaaaaagcaggaaaaagtgccattaaaggtactaaaatataaagctttttcctttcttccgtagtctctctctcgacttgtcatggtgtttttatatttgctatttaatgtcattctaagtaagaaaaattaaaattttaaattattagcatgaattttaccattcatctttatattgtgcaatgccagttttaaatgcaaatataagagcatttaactcgtatgcggaatcaccgaaattacacaatttgtattttatagctcgtacatgcgtatgtatttcgttcttaccagaacagtggaaacgctgcacaaaactaactcaactgtttttatttcacttcttgatacgcgcacattctaccaacactctctacctttggcttactgatgagtaaggaaggactgaaaggaaaaggaactataggttgsccnatctttccctttccttctatgtcatcattttcagcgtaagtggttggctaatacagagaagtaacacgagtaagaaaggatatgacagggttccttggtcgttcgtgtttcttagaatgccattgccttctttctgtgttcgaagcaagttctagtttgaatggaaagcgtggcctctcggggctgtcagtgccccgcttactcagtcgtrgatgtaacacgcttaccttgtacttgctttgagtctcgctgaactcccacgcattgtgggyccaccggaattctgtgctcatggggcaycgcgaatgctatatgcaaatggggcggcaaggaacggcggacacacatattgcgcgtatctcctctgctcacacacatgctccattgtcccatcagacttcacttacaaaacacaagttcaaagataaaattattaagaatttcaagatggcgacagcagagcattaaaccaagcgcggggcccttctgagcgcggggccctgtgtgactgcacaggtcgcacgcccatgaagccggccctg

SEQ ID NO: 169 - DNA, 953 bp, Homo sapiens
  repeat_region (1)..(953): mer45c
  misc_feature (324)..(324): n is a, c, g or t
  misc_feature (387)..(387): n is a, c, g or t
caggaccggctacataatttgcggggcccagtgcaaaatgaaaatgcggggccccttgttcaaaaagcaggaaaaagtgccattaaagrtactaaaatataaagctttttctttcttccgtagtctctctctcgacctgtcatggtatttttaaatttgctatttaatgttcatgctccttcaggcacggggatattcactgggtcagtgcagaccctcacaggtgcccaggrggcctcaccccacgatttggcacgcscacacggcccaccagctgttaggttccccctcctgccagccactgggccgacatgccgtggcctnccgggagcggggaagtcgagccaggcatctctccttcccacgggcctactgccccagcccaangcggatgggtgattcccaagggactgcaactttcatgccggaatgtggtmggtgcctggatgagaggtggacgagaggctcgcccccgccaagtcacccgccaaatgtgctgtggcgactgccagttcagggcaggacagctgtcgccaagccccatcccgagataccacggggcatgcgcccaaccctgacccttcttgcacccgcgcccgggccctggttcctggcggaggcarggggcggcagtggtcgttgggcaagwctgtggagggagaaggcagggcaggtctggggcaccaggagstaggggagcgggcggccgagaacccgccccggggaggcggggaggcagcgggagrcgggactgcskgtgagcccaggctccaagcccccagcacatgctccattgtcccatcagacttcacttacaaaacacaaattcaaagataaaattattaagaatttcaagacagcgaccgcagagcattaaaccccaagcgcggggcccttctgagcgcggggccctgtgtgactgcacaggtcgcacgcccatgaagccggccctg

SEQ ID NO: 170 - DNA, 784 bp, Homo sapiens
  repeat_region (1)..(784): mer45r
  misc_feature (41)..(41): n is a, c, g or t
  misc_feature (52)..(52): n is a, c, g or t
  misc_feature (645)..(645): n is a, c, g or t
  misc_feature (651)..(651): n is a, c, g or t
  misc_feature (686)..(686): n is a, c, g or t
  misc_feature (716)..(716): n is a, c, g or t
  misc_feature (745)..(745): n is a, c, g or t
  misc_feature (761)..(761): n is a, c, g or t
caggaccggctacataatttgtgrgacccagtgcaaaatgnaaatgtaggancccttttcaaaaagcaaaaaaaaaatgccttaaagataataaaatataaaattttttttttaaaatattttaacttataaaatgtaatagggataatagtgatacataaataaattataacaacataaacttataaattgcaaaaaaattattttggtgtcataattttatataatataataaataataatactttattaatgtgatatcttgattgatccataaaatttttttggctcacttttctgcaaattcatttattaggttattaaaatttaaatacttttagcaacttcattttcaattgatataattgaaagcaacatcaatcactcttggcaaatgcaagattacaaataattttttataatttttaattttgagaaggatctttctgctgatgcaactgttactggagctgttaaragtattttatatgctgtgacaacattaggatacatttatgataaattattttaaaatataaattttattacatytatagatgatgattcttgtagaacaatttttctaaaaagatttaactcttcatacaaatcagttttatataagtctgaatttaatttaaattntaaatnttattgtaaatttatacaatgatattttaatgtanttcctctgattttctgtaacttgtggaggnttataagctgaaagtggcttcatgatttntatataattcaaaatncctatttatgcattctatcactg

SEQ ID NO: 171 - DNA, 398 bp, Homo sapiens
  repeat_region (1)..(398): mer48
tgwaagattctccccrgggcctgaaagcttraggggatgartaacccctcccttcctcaggcccagtcccaaggcgcaaggtcacttgtgccagcagtgtgcgccagcaagatagcagaagcaggaagagagccggccggaagacacgtacccccgaagatcgagaaagaggccatccgggtacaacgtagcagttacgtcagactgggacacttcctgtttacaggagactataaaaccyytgccccgtcctcacttggggctgacgccattttaggcctcagcccgcctgcactcaggcagcacccaggcgctcattaaaacagcgtgttgctccacacctcctcgtgttgttgtggacgcgctctcggggttsgaaccgayacaagarccttaca

SEQ ID NO: 172 - DNA, 923 bp, Homo sapiens
  repeat_region (1)..(923): mer49
tgtaaactaaaaataaaatcttaagccccccgccgactgaacggaccccctcttggccaaggggaccccagagaaaccttaaaaactgagttcccggccatgacgggatgggaggtcagacacgcctcattataccccctcccttttgtggtttagacacaacaactgaccagcattaatgttaaaatagagatcataagactgacagaacggactctttgtggcaataagataccaaattataaacaggacctaaggccatgccaggcaagggttaagtcacgcacccctacacttaaagaataaactatgttctaactgccacaaggtttttctttttctctaacagctaaacaagcactggcctcgagataagcaatattaaaacaattgcagctcatccascaccagacgctgactaactgaccccctgttccaccagccataactacagctttgattggacaagagactgatttcagtaactttctcctgataagagaccaccggccatggactggttctggccagtttacagaggctgtgcacttgcacgccttcgtgtcctgaaaasaccttttgacgtatagggcctaattgtaatacatttaaatgttaagtctccaccccaaagtgaacatgggtcgtatgttacatgcatgtttgttcaatacgcatgcgtcaggaccaccttcatgaatattcatagctcctcctgtaacctgttgaatatgtatgcttagccaacccgttcagcataaagctcctgccccaacccctcctccttcgaagtgcctgtctctggtcttggccagaggctacgcttcccagcctgcgggatggccaccttgcaggctgtaaccctttataagaaataaagtctcctttccaaatttatagatctcgtgatttttcagttgaca

SEQ ID NO: 173 - DNA, 660 bp, Homo sapiens
  repeat_region (1)..(660): mer4a
tgtgaaaggaaaataaatctcgggrccccmaaatcactaagccaaagggaaaagtcaagctgggaactgcgtyaggcaaacctgcctcccattttattcctaaataagatagctacaaagataaaaggctacatacctctctcacaatttycyacaaggaaattccttgcggacctcaagatctttaccctaaaacagttctgytgamyttcaccttggcawtgyaaatggrtacaggacaaaggtacagaactgaaagtcatccctctgctcacctgagacaaatgcatatctgattgcttcctctgccctattgtttatgtaaaaatgcagattcactgagccagactmaattgtgtattcagtgaaargctgatcarrgactcaaaagaatgmagccwtttgtctcttatctacctatgacctggaagcccctrcttcgagttgtcccgcctttccagaccgaaccaatgtacatcttacatatattgattgatgtctcatgtctccctaaaatgtataaaascaagctgtrccccgaccaccttgggcacatgtcgtcaggacctcctgaggctgtgtcacgggtgcgtccttaaccttggcaaaataaactttctaaattgaytgagacctgtctcagatacttttgggttcaca

SEQ ID NO: 174 - DNA, 611 bp, Homo sapiens
  repeat_region (1)..(611): mer4b
  misc_feature (193)..(193): n is a, c, g or t
  misc_feature (244)..(244): n is a, c, g or t
  misc_feature (293)..(293): n is a, c, g or t
  misc_feature (328)..(328): n is a, c, g or t
tgtaaaccaaaaataaaattctaagkcccccaaccgtctgaatggacycctcctctyggccaagggcaytccaaagytaacctgraaaactagttcaggccatgatgggaagtgggggtcggacacgcctcattataccytccyycttctggaattcaggcacaactgaccagcattaacatcaacacagacnttaagtctgataagaaacagtttacaayctrttctctctgaagcctgctanctgaargcttcatctgcacgataaaacttggtctccgcaaccccttatntcataacccggacattcctttccattgatctyaantcttcaaccarttgccaatcagaaaatctttgaatctacctatgacctggaagcccccgcttcgagttgtcccgcctttccggaccgaaccaatgtacatcttacatgtatttgattgatgcctcatgtctccctaaaatgtataaaascaagctgtrccccgaccaccttgggcacatgtkgtcaggacctcctgaggctgtgtcacgggtgcgtccttaaccttggcaaaataaactttctaaattgaytgagacctgtctcagatacttttgggttcaca

SEQ ID NO: 175 - DNA, 2454 bp, Homo sapiens
  repeat_region (1)..(2454): mer4bi
  misc_feature (4)..(5): n is a, c, g or t
  misc_feature (10)..(10): n is a, c, g or t
  misc_feature (23)..(23): n is a, c, g or t
  misc_feature (27)..(27): n is a, c, g or t
  misc_feature (32)..(32): n is a, c, g or t
  misc_feature (39)..(39): n is a, c, g or t
  misc_feature (42)..(43): n is a, c, g or t
  misc_feature (47)..(47): n is a, c, g or t
  misc_feature (59)..(61): n is a, c, g or t
  misc_feature (63)..(64): n is a, c, g or t
  misc_feature (74)..(74): n is a, c, g or t
  misc_feature (119)..(119): n is a, c, g or t
  misc_feature (122)..(122): n is a, c, g or t
  misc_feature (380)..(380): n is a, c, g or t
  misc_feature (419)..(419): n is a, c, g or t
  misc_feature (495)..(495): n is a, c, g or t
  misc_feature (1462)..(1462): n is a, c, g or t
  misc_feature (1683)..(1683): n is a, c, g or t
  misc_feature (1686)..(1686): n is a, c, g or t
  misc_feature (1688)..(1688): n is a, c, g or t
  misc_feature (1779)..(1799): n is a, c, g or t
  misc_feature (1782)..(1782): n is a, c, g or t
tttnncactnggaatttgggttnctanragtnaaaatantannagantaaaatgttttnnntnnagtttataangayatgaggatgtgktttttgttgaaaaaaatgtatttttgtctnagntagaagttatttaaaagttgtttcaaaataaagggaaaaaattatataaataaaaataaatgrataaagagaaaaataaaaaggtgggaaatgagaaacctttgactcctgggtggccahgtggtcacccatagtatagagctgcagctgdgctgtgttcagttactaaaggtaaaagttaccagtgaaatttagagatggatcatactcccagggagttggttcactggatgcataaggaaatgcaaactaataagncaaaaagcaaatatgcaatctcttggctattgttatctntaatagctaaaaaaaaaataaaagagtgctgggttgggtcttgatgctggaccaagctcagatgtvggtctgtctnagctcaggccactagcctcaaagctacccacaaaaagaaaaattaagccaggacaacaaaaggtacctctgagacctgtggttaccaagaagatagtcaatrtgggggaagggcaaaaccaagtaactattaaaaccagagggtataatgtaaaggaattgttccattttgtagattggtatcatcagcttcctgaaaaacctttactaaaatggattgtgagaataactaatttarggacagtatctttrrttttaaatgctgcagaatrgaagagcatgtttgggttgatgcaggaccctacagctcactattgaacaatcactgatgrgtatatgtgatccaaacacacaggaggttattcctgagagaacagccagcctagtggactggataaaagccactgtaaggtctgtttaccctgagaaggggactgcccaactctccctataaaatgccaagtgagagcaccccagatgaagcagctgatatgcttcatatgcaagccatgtgggactggctttatgatgaccgggatattcacccactgaatatgcctattacccaggtcatggtaaatgctggggttaagggggccccttttacatgggcaccccatgtaacattactcctgcagaatcaaacaactgtttaagaagccttatcaaatttgctgtccctcatgggtcttacagatgcttaataaaacattagawtaattaacaacaaaagaaaatggaaaaggaaaagggagtcaaaggactcaccccagaagsgtggtggaaatctttaaatggttattaagaaatggaataaattaaaattgatggggttaaaacaaaggtctttacaacactatcaaaggttgggtggaccaaagggagcccctgctggtcccccaacattaaagggccccaaactagttttctgtatttrctccagattggagaaatttaaaaaaaatcanaaggcaaagattataatgagaaagctgacattgcctggrgcaatgctgaggcaaatyaagataaagattgacaaaagggcctgagtcccttggctcaacyccctgctgggaacccaaatcctttttcaccagaaaaggtaaaatggtctgggagtagaraagaaaggttcctgggaccagaacataaaaatgtaaaggttgatataatgaaadatatacmnttntnaaagsttgaattataaaatttgaaatgtttaaacakyggctttatgtaaagtagttgtaactcctttacctaaatgtcttatgaaaatggntantgtatctaactgggggatgtttcccctatctagtactataaaacagaaggcatgtaaatctgccctttaagaaatgttaattggacatgctaaatgggaacyagtaagattgcctaagcccacagaatatagggtagaagctggagtgctagtmgggacaaatcctccacttcatagccctttgtggagcatttacyggggcttatggcaaaagcctgtgagtacttcccaatgacaacgactgagactttggactagagaatttccacttgaggggcatttactgccttgctatgggatgttaactgaagctacccctatgctaatgaaaataatggtgcccaaaagagttccatgataaaataaaaatggtttatataggatcttgctacctgggaatgyaaggaggagatactcatgagcagagagcctcttttcccctaggactaactctaactgtgtgaggagctgctagattctacagtgcctaataaacagctctcatytgacaagagctgcttggtttgtgaatggcagttccaaggtaaacaaacaacatcttgtttggaaggctgctgctctggttaaagaagagtcaagaaaatctttttcttttaagttatttatagtttagagcaattgggtaaagtatgtttttgtaagcaaatttac

SEQ ID NO: 176 - DNA, 465 bp, Homo sapiens
  repeat_region (1)..(465): mer4c
tgtgaaaggaaaataaaaacttgggaccccaattcactatgccaaaaggaaaaaattaagctgaaagctgagtcatgcaagaaactgcctttccttttgttcctaagcagatagctacagataaaaggttaaatatctccacaggtagctactctatgttcaccttatcttatgtaaagtgccgatttactgagcacgagacgaatacataattgactattcccctacctgctccttttctcttgcaacatgtggattcagtaatgtgaccataccctccctctttcccctccagcccgcttttcccctttaaatattgaagccctcaaaatcatctttggagaaaggcacagaccacagatgtttctgtgatttcgtgtttctttctcccgggcatgtccttaaccttggcaaaataaacttctaaattgattgagacctgtctcagatactttttggtttaca

SEQ ID NO: 177 - DNA, 1017 bp, Homo sapiens
  repeat_region (1)..(1017): mer4d
  misc_feature (214)..(214): n is a, c, g or t
  misc_feature (654)..(654): n is a, c, g or t
  misc_feature (890)..(890): n is a, c, g or t
tgtaaaccaaaaataaaatcctaagccccccaaccgactgaacggatccctctcttggccaaggggaccccaragaaacctgaaaaactaattcaggccataacgggaagtggggtcagacacgcctcattatagcctcctccctttggagttcaggcacaactgaccagcattaacattaaaacagagatcataagactgacaaaacagactntttgtagcaataagataccacgaggacgaagytctkatttttttatcttgcccaaattcctatgtaaggggtctagggagtcgcgccttacaaaccatgaattctcattagatgggttttattaaaccctgtatatcgtgacttaatttccaacctgactctggtatagcatcacatgacagatagcagaccctgaaggaaatcaaaatattttaccccaaaatatatttctttgacatattttgaaatggccctgcgaagctgtctcttgtggggaaaatctgcattctgtagagaatctctttccctttctaggtctttttccctgatccaggggagaataactgagagtctggcaccttttaaggtctgataagagaaawttaccatctattctctctgaagcctgctacctggaggcttcatctrcatgataaaanccttggcctccacaactccccttatcttcactcgattgatttcaaytctttagacagagcttaactctttcaaccaattgccaaycagaaaatctttgaatccacctatgacctggaagcccccgcttcgagttgtcccgcctttcckgrgcgaaccaatgtacaccttacatgtattgatttatgtctttgcctataagttccgtctccctaaaatgtataaaaccaagctgtancccgaccaccttggrcacatgttctcaggacctcctgaggctgtcacgggccatggtccttcactttggcaaaataagcctctatttaaattgattaaaatctgtctcggatattttttgctttaca

SEQ ID NO: 178 - DNA, 780 bp, Homo sapiens
  repeat_region (1)..(780): mer4e
  misc_feature (31)..(31): n is a, c, g or t
  misc_feature (404)..(404): n is a, c, g or t
tgaggactaagctctgatttttttttttttntttttatcttgcccaaattcctatctaaggggtctggggagtcatgccctacaaaccataaattctcatcagatgggttttatttaaccctatatatcgtgacttactttccaatctgactctggcataacattacgagacaaggaagaaaatcaaaatattttaccccaaaacatgtttctttgccatatcttgaaatggccctgcaaagctgtcctttgtgggggaaaatctacatctgtaaagaatctctattaacatagctagatctttttcttccaggccttcccaatcctgaagagattaactaagagtctagcaccttttaaaggtctgaataggaaacatttgtcatctattstctctaagggcngccactatgagacttcaaaagaaccttggtctccacaatcttttatcttaacctgaacatttcctttctattgatcccaggtctttagacaaactcaaccaattgtcaaccagaaaatgtttaaatttacctatagcctggaagcccccactttgagttgtcccgcctttctgraccaaaccaatgtatttcttaaatgtatttgattgatgtctcatgcctccctaaaatgtataaaaccaagctgtaccccgaccaccttgggcacatgttctcaggacctcctgagggctgtgtcacgggccatggtcactcatatttggctcagaataaatctcttcaaatattttacagagtttgactcttttcgtcaaca

SEQ ID NO: 179 - DNA, 6388 bp, Homo sapiens
  repeat_region (1)..(6388): mer4i
  misc_feature (731)..(731): n is a, c, g or t
  misc_feature (922)..(922): n is a, c, g or t
  misc_feature (2530)..(2530): n is a, c, g or t
  misc_feature (2879)..(2879): n is a, c, g or t
  misc_feature (4632)..(4632): n is a, c, g or t
  misc_feature (6128)..(6128): n is a, c, g or t
tggtaaccatggaagggattctgagtggagatgcccctgacctttgacaaatctcctatcggtgcttggtaccagcatgagctaactttatggcycaagctcaarwtrtctttatkgctcaaaccaataggacaatttgctgaggtctgrgagcatctccctccagagaatccctgatctcccaaaatttggtcgagatctaargtttattttgctgtacaactcctctttttttggagttttacttgcttccaacacaaggaaggcgagtttttcctgcttccatgatgatggaaggcaggtaactcctttmtggagtttsagctcgcttccaacagggaagrtgagttttttttcctgcttctaggatggtagagagcagtcttcagcctgagacccattcctaggtaagtaactgaattggggtttgtcttggaaattctccttcttggctaaaagttaagattaacaatcttggaaattctccttaargactaaaagttaagattaacaaccagctggtcttaatttctccttaccattagagcgctcagtaatcatataagttgtgcgatcatttgttttgcttaactgcttytgtttttgttgtttttgtttgtttctgtttttgttgttgtttcwgtctttttcctattgggtttgaccaactctatccgacttgatcagtgtggtggggggagaaaaacggccagcaaaaggaaaaaattgancttgtttactttgactactaaatctgaaggagaattccaaattatggggaacaaggcctctgaagtggctaaattcccacaaaaaaaaaaaaaaamaaaaaaaaaacaaggcyagctttttgctagccaggccaaactgaaagagcaatggctgtcaccycacgctgcagttcwatagctaaggtyctgcnttttttttttttttcaccgtgacagcctgggtttggttcytaaatcaagccctttctggtttgatasttggtacttctgaaatagcagcwgtttgtcctagctaaaatatggtaatgagatttkaaaggatttttttaaaggagctcaatggttaaaagtcagcttaattaaaaggctaacatccaagatgtatgtgtgtatgtgtgcgtgtgtatgtgtgcatgtgtgcgtgtttgtatttaaaaggccttcatgtttttgtttcgtcgtttgtttttctctcctaagaccttgtctttttttgagcaaagtttttttcttctcagttgactgaattctgttttcttcatttacttttcttccaccctgttcctccttccctttgccatcttykgyaccaagtgaarrgayctagaraaggcttctaatracttgagaccccttaaagaacwcagaaaaaggtgccacwcacccctttttgaggrtaaacttctgtttttccttatgggacctcaaaagtagtaaahagacagattcctctcaggtctaaagctctgctytcttttgyattgcgttacctgattttttgactaaaatagttattgcaacagaggctactcttgggtttttaaggaagagtgtagtgtagacacttagaaatgtctttgtttaaaaakttaagtrcactgtaaaagcatcatrtggyttagyctcatrataattctccctttttrgagacccagcattcagtgtgggctctgcccagagctcagtgrtccagttaaaaataggtagtctctatytaaataaaattggtctccttataaaatcctatgatagatttctataattttatgtttratttggcatcaatytttaatcttcctctagcaccaccagactttttctctctgtactttaagatgtaaattttgctatytgatttttcacctaagagttgtttcctttaatatgcaaatttagggctatttagctgacaactgcctagggtaatgaaacaggttatcaagaatttgaaagtctaagataggaaaaaaaggrggtcttataaatctataagatgtacttctatcagcatgcctaatacgtctatgtatttatgtgttgtgtacacaatgtttcactactaaaaatatataaaagagctctaattaattggcttaaagaaaaataaaagtgcttaaatcaaatactttatcaggaaaaaagaaaagactagtcaaatgctttttcaagttyatgaaatgctttttcaagtttatgtaacttaagtaaaatctttaataaataagctagctttaaaattattggtaaagtaatattagaaatgtcttaagaattgccagcatacatttttgtttgcattatattaatcaagcartttcatacttatccctgccaaatactataaaggtgtcaaaatttggcataggggttayaaaactataaacccagcccaaaacagaatgatctttgcttgtgtaatttttaataaataagacattgatattggtttaatgaaaayagctrcatcttgaatttagtaagattaccataacttctaaccttgtggctttaggcgrtyntttaaatgatgactatcgcagttttcataaataatctaggtaaacaattaataaaataattaggtaaatgtaatgggataaatacttgtagacaaacttgtcataatttagaatataaagttatattaaattaaataatagatawttwattatttgrgtattttccaataaaaatatattgtaggaaaacattcttkcttaaaaaaaagtgtgtcctttttaaaaaaatggtgaataagttttgtctaattcaaagcttatttaaaggttatrtataaaacaaggtaaaaggaaccaggaaataaaaaaaatgtaaagaaagttataaaaataaagaggtattttttgnargtaaaaaagctgaaaragaaataattttatatgagaaagaatcttatatggtaaatttatgagaaagaatcttgtatggtaaatttttgtcctaaaataaaatgactggtttttaagaaagaggwtgtttaggacaaatcagaaagtccaagcatgttatwaatggtctgtgtaagtcataataaggtttgcataaagagaaattaaaaaawtttatatgattaagttggctataattaaaagraaattatttataatagtctttctagagattgakgtttgatattaaaaatacactaatacactaaaaattkgttagaaaaacaaaattttcttaaagtattgatttaytcataaaattacaagagattttaattttaatccaaaaattcaacttttattgcatctcactgttttcaagctttttctcctctttgagaaggcctgagataataactctctccttcaacttttttgtcagctcctgtaattttttcctchggttctaactgytgttgtggcctgatgctaaaaatgttttatyttaaaggtctaaaagmaatgttttcttccaatataacattctgtactckkcttttcttgatgtgtctgaattgttccatgaaaccagaaaacttcactcataaccctggayacactcttccttgtctaattaattcaagtactattttcatcagtttgacttcaggttatctaaagggcttcccataaggagaagcaatcacactgcagaaggtttttcttttsctttttggtaactggcctaagaaaaagattttatgttttatcaagataatttttgtgttattattattaagtttttgatttgcttaggaaaactgagattaaaattttttaaattaaggttattacatccatgtatctttctgtattgcttttaaagtccttgtgacattgagttacagggctttaactcctgggtctaaaaaggacaccaagtcctgctaaatcttaaacactgacagcaattaaagccycatcttcaggcccgtagaagatgccaatcaaaataaactgcattcctgagacacaggaaattaaagctattcaactcctcaaggcccagggactatccagaagaggtgggcacgtgagattgtaagggccaattttgaaagataaaataagttcaragtttctctataaattaatcattaaaagtttctctataaattaatcattrawatcaaaggcacactgatgcaagaccagcatatgggcccctgtgtcagattaacaaggttttcttgaagcattaacckactccttaataaaggttgtaaaggttataaaaggcttatgraaattatatcttatggtcaagattaaaattttatagattgtttataaaattttgaaaaacaaatttaattggcttcatgctgtttttattagggcttattgtttggaaaattaagtctcctctctcaaagaatgaaggtttttgccttttttgaaatccttgagttatcactttggttaaatgaatgacttattttacaatgacctgtgattctattttgtgatatcaagtgttttaaacctttgatatttgacaaactttccaaaatcaaattataaattatgtctttctgacctaattaatcctttaagatattaggttccttaaagtccaaaaatgacataatttggcttatttggtacaaaaattatayaggaagcattgtcaaatatgaaaaatgtttaancytctttgggttrtatttgtataaatatgttattggtatatgttccaaaattatatgaaactcctataattctgatatrtcttagtgtatattatcartaataattataattattatgttaaattattgtatgccacagargtaaccaaatttcctcgtcaattgtgtctttaactatggctgttctaagacttttgtcatccacggacaattgttttattttgrtcctytttaaaaggtagtttataatcagctatagractctaacaagcgctcttaaatrcaggtttctgataactttggagattgtgacatcggaatagaggaaaaactttcaggactcatggararctaatgtgttcatgaggattgctaacccaacatcgagcaagcagaacaggaattaactgcatggactgaaccaatagaagabtgaaadaatctttttgactttttgcttaaaacgttgctgatcctttgttttgtttttcagagtcaagaaaacttttcttttgagctatttacagcttttaacaattgagtatagtatactcctatgaacaaaatttggagcatatttgtttctctctacctgatttctccagaatttggaaactatttgtgagtattcttaacttatggcaatacagttatttgcataagtgcaataagaatctgttttcatttgtaacaggacacaattggagaaactggttattttaccaaggctttgactggaatggtgtactttcctttaaggaatcaaacttgacttatggagccaataaaagcccttggaaaaactggcctcataccttgtbtacgcagtccctgtacaaggtttctgacctgtggtaagtaaagaatgtcactttctgacaggcccaggagccccargtttatcttggaacctcaagaggagaggaaattcacccaattcataggtatttgawggcgcaaatccatggctgggctcggctttaaaaaagtcttatctgagattccttctatggaaaaaagttccakcaaagccaatttaaaaagagcctatataamaaatmattattcttgctgcactttatgcaaataatcaggccaagtataataagastaaaacttattttrhaaacaaattggtcctaccatgatttgtctttagtaaaaatgggaaactggagagagaaaaattatgtttcaaaaactatagtatacctgttattagattctagttgtttttcaatttttattattttctacagtttggactgaattctaaattttttcctggctacaagtctccaaaataatgttttcaatactttttctttttttccttccwtttttcccatttttcctaatttaaaatcactraaaactaaagctgtgcttktcttaaagccctgcaaactgaarctagacaacttaaacttcagaagaaaataatagcaacctatttacatacataagccactttcatacctgcctactgatgtatngacttcagagtaatgtgrcctrtrtcaattttccaggattgttcttttgtttgttgttgtttttctcccttcctcctcctattttstcttcataggacatgagacttcacaacctgctaaaaatragctttcctaawawctcgggacctacccgtctaggaataaactatcctagccacgagagatcagacgaaacctgagaccagagactcattttcttctaaaatgctttctccaaaagattttagaaaagaagggaa

SEQ ID NO: 180 - DNA, 734 bp, Homo sapiens
  repeat_region (1)..(734): mer50
  misc_feature (47)..(47): n is a, c, g or t
tgttagagtaggtagctaggcagrcatgagcagggcaggagagggcnccccccacacacaccacgaatgtcgggtgaccatcaggtgatggtcaggcggttgttaaactgtctctctaaaataataattggtcacagccagcgccagggaaargcagtctcctaatagatagaaaacacctgaarctggtgatcagcagcttcccgataagatctcaggagttgggcgagtgagctcaagcatgcgcactaagaggcaaaatgrcggagtttaaccggcatatgaccttcctctaggaacactccaatggtaagggaaraatgcctcaartgagcatgtgcacaactccagtaaacacactgtgcatgcggcccytcccaagtgctggcaggccactgcgcacgcggacagcccaccccaaggaaaaatcaagggaggagraacgcaaaccccggaagcatgccgatgtataaaaccccaagtcaaaggtcaaaccgcgcacttggtctctcaagtcgcccgcttggccctcttccaagtgtacttcgcttcctttcgttcctgctctaaaactttttaataaacttycactcctgctctaaaacttgcctcggtctctttttctgccttatgcccctcagtcgaattctttcttctgaggaggcaagaattgaggttgctgcagacctgtacggattcgccgctggtaactcagataccttccaccggtaaca

SEQ ID NO: 181 - DNA, 1405 bp, Homo sapiens
  repeat_region (1)..(1405): mer50i
  misc_feature: n is a, c, g or t
tactttggtgccacgtgacttggatacgttccctagtggtaagagacctctatgcctcaccttctttggctggaggcgttcaacccccgtacgcggttttcttctcccctttcactctcctgcttactaaccaacccccagaacgattcctctcagccacagtggctctgctccccctggctgatctctcagctcaccctgacgggtggctcgcaggggtgggaaggaccttggagtccacaccgagtagacctgagacactaatggccctcctggacaggaggctcatgagagtggtagggctaaagcctaagaccgtgcaatgtctggggtttcctctgctttttcaactaaaattggctctttcccaaaaacccacaccgcctattctcctgttttctctgtgtgtgttctgaaatggccttgcgcacccgccggactgtccacctcgggggcaagtctgccttttctctgctttcactttgcatgccacgcgacttccttctctgccttaaacacacactccctgtttgttatttgtgcacccgcggctcttgctgcatttgcatggcagcaaagacacgggctcccttgtggatattccctgagatttatacttgtttttaccctaccagctcagatgacctccaacccttcctctgtctgttggctcattgccaggacagacactaatcggaaccccggctctgccagcttcttatgacttaccatatacttttcattcctgttatgccccagggccaagttttccggtggcttttgaagcagtttgtccgcctgcataggacctcactctgtggccctttaaggacctcacctacttgctttttttgagttagcactcctttgggaggagggaaaattcttcctttgccatttgcgagctcttatcccaagccccaagtcctccagaggttcctcctttatgtcaagagggcaaataaacgttgccctctcgaatccaagggctgctgtttttgcgagcatatgaaggctttccatgagtattcctcttgcttcctcccacttcctcctgtagcagagggattgtcctgtctgcttaagcatttgttctgcatgttaccccaggaggacaaggaaccccaaatacaaaattttctccattcctctaatcacttccatgcccttctcaatatgcatcaagaccttcaaggtcatattcgaagggagggaagtccagccccttgcggcagttagctgaaaaacaggcttctcatctacttaaagaacatgggaaatggaatatgagaaaaaaagagataatcattttgttgctagaatgctccaagtgagagtcactataaggtcatggagacaaggatataggctggcccaaggccgcaggcacaagagacaaagtacc

SEQ ID NO: 182 - DNA, 617 bp, Homo sapiens
  repeat_region (1)..(617): mer51a
  misc_feature (67)..(67): n is a, c, g or t
  misc_feature (75)..(75): n is a, c, g or t
  misc_feature (135)..(135): n is a, c, g or t
  misc_feature (135)..(141): n is a, c, g or t
tgaggcaggaaaatagggtctggaggcagggaacataaggccgattcacactgacttcctagaactnaatcaaanggaaaaccccaactttccacgtccamgtaacmaaaggaccagaggctactccctttrcannnnnnngatgaaaaattgaaagtacctctgattggtcccttcccgcaaccaatcaggctggtcgttggcccaagtcttcatttgcataggagtataactttgtaacttcacttcagcctctgattgatwrctttccgcaaccaatcagacgtttgcatagggtgtaactttgtaaytcgcttcagcctctgattggtcccctcccacaaccaatcagactgatcgtgggccacctcttcatttacatagggcgtaccccaagtaaccaatgggaaacctctagagggtatttaaactccagaaaattctgtaaccggggctcttgagccgcttgctcgagcccgctcccaccctgtggagtgtactttcgttttcaataaatctctgcttttgttgcttcattctttccttgctttgtttgtgcgttttgtccaattctttgttcaagacgccaagaacctggacaccctccaccggtaaca

SEQ ID NO: 183 - DNA, 371 bp, Homo sapiens
  repeat_region (1)..(371): mer51b
tgaggcaggaaaatagggtctggaggcagggaacataaggccgattcacacttcagctatgacaggaaatatcctctccatagggcataggccgagtaaatgactttgtaactttacttcgtcctcttcatttacatagggcgtaccccaagtaaccaatggaatcctctagagggtatttaaactcccaaaaattctgtaatggggctcttgagcccctatgctcgggcccgctcccaccctgtggagtgtactttcgttttcaataaatctctgcttttgttgcttcattctttccttgctttgtttgtgcgttttgtccaattctttgttcaagacgccaagaacctggacaccctccaccggtaaca

SEQ ID NO: 184 - DNA, 7816 bp, Homo sapiens
  repeat_region (1)..(7816): mer51i
tattttggcgagccagccaggaggaagaggtaagcccaaagtttgggattyatttttctccytttcctttctgctccatacaggggamtctctctctctcttttcctttccaacttgggacccttggtgggcagcgcctaaacatggaagcaactgcaggtttctggccgtggccagtgaaactaaggrgtttccatgtggagaagcctdaccaccactgcccggttcacttaagggacctgagtctttttchtttttcttttcctctctttvtttttcagtctttcagtggctgtttcctagtagctccttggaaattgagggcaattggctggggtcactccccagtactgcctgaaggcctaggaatgaatgggaataattgccctgccccgaagggggaatgrmwcttttwtttttttatcttttccgvgtgtggtccctgatccctacatgcggcacagctcagrgcaaactcacacgtgtttcaggkgacttaaaccttcttttcttatgctaaattcttcccttatcgtactcaactggctaaggaacaaaaaggcccacccagcatccagttcctatcattacagttcatggctatymctaatggaatggsaagcacgggaaagcgtggcgttatcaaattmtaagkatgctaraagktgrggccttcatcyaggkacwawwataaagctcatagtaggctctggagggaaagcatgcaaagtggcactggtgcccacctaaggtcagagacatctgacactctaagattggacccyaaagggggaktcccttggggatcctycagaccccaacctctccaaaacggawgcccttggcagaggtcctgaggtctagtwctaagccccccttagaattttctctmgsagttgcaatactgtgtggaccccmtattgtttggaatctgaagtttrctgttgaatgggaaagtgagacggcgttstatgtrtctaggcttttgtgctgcgtttctaagcagggggcctggtgaacgtgttataccttcctttggtaccgtttggccccagtgttctttggagtctggggaagtttggcctctaaaaatcaaactgccatggaaactgctatacccgaaattttggttcacagccttcattggattatctattgggacaaagtaaaaccarcgagcttgtattgctatctcatggctarggttccaaagctattgratcttcatttrtgtgtgtatatacgtgtctagatgtgtttatttgtatgtacacytattgttatacgttgtgtctaccataattggcytacaagtaaaagagcactcataaatcaagtaaataagtcagagcaattttcaagttcacatgactataagtataactttactaaacaagcagctttataaattattgaggaaataaaaatagaaatgccttcagaattgctagcatacgttttgatctaagttttagatttgtctctgctagatattcagaaggatcatggtttggcatagaaagttataaaactataaacccagccaaaacaaaatgatcttggtttgcctgcccttttttttttttgacaaatgatagtaatttaacattagctaaatcttctgagctgttggccaaaatatctatgtacttaactttgaggctcttacttaggtttgggtgagcacctgatgttcactggctattaaaaatgtggttaacaaggaaataactcactttaaataatagtgtctaatatctcagtttacagaagtaatctagataaactgtttaaaartraaaatttaagtacatgtraatgggataaatgttttaggtraactttttgtgtaaattaaaatcttaaarttatktttgatgctcattkaatatctgggtcatttccaattaagaaagggttgtratatggggaaatatgtttctaaatactgtggaattrttcttatctataaatgtccatatctartagytcaggatttcttgctttttaggrtttcactaaagttttaggttactaaggataaaattctagttaacacataattttgtatacaaaacgtaccagaaagggttrtgttattartgrgaaaaagaataattttrtctaattcagaagttatmtaaaagttagttcmarttacagayttsaaaaggttatttatgaaayaatgtactamgkaayyaktargtaggggagaaaratgtggaaaaagtttarataataaaatattctttaaaacctgataragaattggagacatttgrctaattaacattttcatagttaaagctgttagtcttgaytdataaaataagaagtattgtaaagaaacgcatcrgcagtttggcaattcttttttttaaatacagttaagcatgaagctggatttagtgtrgagccaaatttcayatacatamttgcattgcttcmcmctatgtttactgttttgcgtggatagtgctggcactggagtacttattggtcatgtgcctaragtgaatttcttgrttgyacaggatgtatrrtgatattggtrgacttgaggatayttaattgtgtatcaggaataaaatattcattatgtgagtttttttgggggrccctaggtaacactrtagtctccarggtarattgagtaggaamatttagggttggtktcctgtttayttgtytttgcttcyarttttcattcgtttgctgtttatttctcctctggctttscttgtgtgtgatcgtatatacataaaacyattgatttttttgwtwygttttttagttyctagtggaaggcttttatttggttctgtggatagttattttgtttcctatgctatatcattyctagcaagtcatcatttgttccrtttatctggaattcctargctacctttgttaggcccgcaggaattratggagcacacmarcttttctatcctattataaactaactttttggawtttaggcttcctgatactttaagggtgttgagtrtactytcwtaaatagaatttgagtcratatttctctttctctgcctaatttctccaaaatttgtaaactatktgtgactattcttaattcawkgcaatgtgwttgtttgcatacacagtcragcagggytgctagggcygctcagggagagagaacccagaaacctggcatgcwggcaaaagggtaagaatttcttaccaktcagwctctggcctctctctctctttctttctctctgtgcaaactggttaaatawawagtaaaagtcactgtttatctcctctgtaaagttttarattaatwkrwwwaagaattctgaggctggtcttaagctgtagtgaatctggtgtgctttatgtgtctttctgtattgttctgtcacaaaaaggggtacattaggataaaatgcgtgcctaggactccataggcttgctgttcaagatggcccagcaaactggacagtcatgtccttgggagcttgacctcgtaaccatgtggccatgctttctttctcttttcacaatggcagctgggtttagggttcaattcctggcttagggaatgagtcctttatcttctatctatgtatttatgtgtgttgtgtaatataaaagaactttaattaattggtcaattaataataataggagcttaaatcaaatattttgtcagaaaagtrraaagtttaatgccttttatttagttcaygtgrcttaagyaatctttgggaaataaagacagttttaaagattattggtaaaataaaaatrtcttcaaaaatgtaaaaatktggtctaaattatacagktcaratatyaggttygctaaaatgctttaaggtcataaactgcttgtttgacttttaaaaattattcaatttattttggagtattagattctaggtaagacctggagacatgtgaaattagtcatgtcacctagctatgcaaagaagtttataaagaaaagaaatcttacataagaaaggatcttatatggtaaattcttgtcctaaagtaaaataacaggttgtttaaaaggagagatgtttaggacaagtcagaaagtccaagcatattatagatggtctgtgtaaatcatgaaataatttatgaaagagaatttatgcaagaaatgttgtacagtttaaaggtgattaggcctcctaaatgcttcataamatgttactgtgactcgaatgaatawctgtwcaacttgcctgcttyacagctaggtaragcgcgtagggacasatggagtggccacrccccttccatgctctacctactgatgctggaaarggtcagaccttatctggacttctgggtgggtcctaggctccacccctagtacataattaaagaaccctaaacttatcaaggttwtcwtcaaaagtaaawgtcgycaagagytmgcattgtaacatstaatwgarcctactgaagaaacagttttacatsaaaggkatgtaaagcaagaaaagtgaaatagggtttggtgtttttggtaaaagattatawkmwwkmawrggaatgtgggtttttttgttgtgcctaaagggctaaaagattgttttaagttagaataaagctaaaggtttgaacaggttgtggaaggtttgcaaacaattaatcttgtaaaaaattatgtgtgtgaacatattgactaaatttaaagggttattttctggtttgtctgtaaattgaacattgaaataaaaacacaaacatggttttcttaaagcactgatctgctctttactaaaaatttatagagggttataaaagatttatgagattctcattgtatggtcaaactgattaagatcggaaagatttgtctataaggttttattaaaaattggggttgacattaatagtacactaatgcaagggtgaaatgtggctttctctcctgaacaagattttcatgtaatattaaaagacactgaaagatttttatttgccttttgaataaactaccaacaaaaaaagaagggaaagacaagagacagattgtttggaaagctaagtcttccctctttcaatgagtgaaggtttttgtcctttaaagaggtttttttggatcaatcattttggmtaaawgaawgwcttatggtaacctggagttctakwtcatamtatcaagtgttttaagcctctaacatatttgatcwgrmttcccaaaatcaaattgcakcttcaaaattgtcttytcwgtsctcgracttctgaggatgatgmgaagggcccacgtagaatcatccraaagagaggtgacaagaatcatttgacwcgtttagttacatgggaagtattsacaaaaactttratratytagtcttcttcaggttatwgtttagtgaatgactcatatatatattttccaaaattgtatgggatttctaaaattctaagatgtctgagtatatgtcatcaatcataattawggttattatgttaratgattgtaaaccacagaaataaccaaatttccttgtcaattgtgtttttaactgtaactatttaaagttatttccacagttaattgtttaatgctgatgcagtttctgaaaacgtcacaagcacacaaaatcctagaatatggtgtcttttaggaagttgattaaaggatggaaaggactctaaaaagcactcttgaatacaggtttctgagaactttagaatcatatcatttgaactgggtaagaattcctggaactttaatgaaaagactgactgggttataatacwgctaacctaggatagaagcaaaagattaattaaataccaagaaaatactttkccagatttytatkctaamtcggcwattactgaaattgtttagatatrcaatttgactgarttcbatggtctaadtchvagtaactatgataavccatcvgttahcagtgbtattcaccthctdtgdtgaaachactggtaddcaagabhatataabdctaatgtthattaagcatggattcatgtdddatgadgdtggtcaccttgavgdbbgchadtvctthaagagtttattattatgctacagtgtattttcaccargtaaagaaagaaarctttttatgkyytgaatcttctggaaacaycagagaaakactrtccttgycatccasrcyacwayaaaacttcrggrmyttgrrctttrggttcatrrtctcacaaytgagaagggtccctcyayrctcttsaarctgtrsacccattggaacccttaaggtwaaactaaccarggwaatagtthcaamtggacgaagagttcatctttgatgtaaacatctttttccaagatcacagattaagacttctactatcatgagactcttatccttgaatattktcttttgtttatgcctctatgaacaatagaaatgaaaaagggatctgttttgtgcacttatggggtatacttttatttgtgaaggattttgcagccagccttatacatggataatcttatactctgatagataaaagatgaagacccagtgtaggtgagaaactttaatgctacatacgttgcctcataatcagtcagaaacagaagattggttcactcccattaacccaaactcatgggttaaaaagaacadtcccaggaggccttcactcttctataagagaagggcatcatttattaggtctattttccatttkgwaggatttgdaataaaagavgtaatgatdaaaaatgtatccctcacaataggttctatagcagattctactgtaaagtctatagttacacaacagactttaaattatcttgtgaaagttatgctaaagaatagaattggccaaagagaaaagtatctatgcagctgctggcabtcatggcctatggdggaaaacathaggtrarkattatagagtttcagttgtagtggattgacaacaaaaadactgtttagttaagtgagtagactgcttatctagctcattctttgatctatttgattttaggtggtttggtttatggggaccctggataaggaacatacttcaaactcttggtattatcchchtgatagtcataataatagtctccctggtgcattgtattctctcaaaggttttacatgcttgcatgcagccatctctagaatgtcaaatggtctctcttcaagtggaatgacaaaagctgaatgaaatatgtgaccacaaggacactgtaacctatgaatggcatgctgagaccagaaacccaaaatgatggtaactgagagtggtactaaggctctaagttttgdtcatactcttacctaagtgagaacctgaccaaaaggggggaatttttaaaaacaaaattgtggtaggccattgttttggactgagctcatgcattagacctcatcagatcaaaccaaaaccaaaatggagttgcttgggctaagactttaaggcaatacatatggatcctagaavagaavaggttttgttttttctcctgtaaatctctataacaaacattcctgagagcataagtatchacctcctgaagttcccattaaatcttttaaccaaattcatttcctctctcctagagaccatcaagcttcagatgatcatgtgacaaaggttccagtcagttccaggtgaagacaccacccctggtcattaaggagctaccctgtctccattagahagagcagggtaagagttctgtgatccacaatgggtagggactacacchbgagccagcatgaagcagttacagaagaaagaccgthagtccctctgcctcccataaagatttatggggatcacatctcwtyggggggaa

SEQ ID NO: 185 - DNA, 1755 bp, Homo sapiens
  repeat_region (1)..(1755): mer52a
tgatggcagcggcggcccgtctggagtggccgctgccatgatgccggctgcagcgggggaggcgcggccggggctgcgcgctccatggagccagcgggagccgggaacaggcgggagccccgcccccttccgagttggggcgggagctccccgggtgcagctgcagccgcccaaacgcagacccaggcctccctgtgctcttgggggccgggagcaggcaggagccccaccctcccgggcacagctgcagccgcccagccgcggctscggacccaggcatcyctgcgctctcgggggcctgggaaggcccccctgcccccacaggcttggaagtgcctgctcccactgcagctggcctctccccgctcccggcgcccgctccgcaggctcagaagtgcctgctcccgctgcctggcctctccctgctccyggcgcccgctccgatttcggagcaaagttgyggccgagcccgggcgctgtcgcaacccggccgggtgtgtgcacgctcggggcagcgctgacacgccagccccctgccgcctcggccccctccggactttgggcgccgacgagcatgggagggaggccgagggggggctgagggcagctcggcgckggcctgcaggcgcccctcggcacgaacagcctgggtgccatgaacggcagcaggaggcagacaggctcctgggcagaaaggggcgggtccccggtgaaaccccaccttcaagccagggacggcctgaagcctgggggccgggctgccagttccgggtggagtccgcggmccggagtgagaacttrtggtgctttttctgggcccacccatggccgcccatggaccaatcagcacgcacttcctcccctctgargcccataaaaaccccggactcagccagactyagrcagaygwygggacgaccagctgcagagaggagctacccactccggggtctcctctctgctgagagctgcasagwcgwcgggatgacctgcctgcagagaggagctacccactccagggtctcctctctgctgagagctgaacactcgtcgggacgmcctgsctgcggaraggagctacccactgcgggtctcctgagagctgttctgtcgctcaataaagctcctcttcgccttgctcaccctccacttgtccgcgtacctcattcttcctggacgtgggacaagaactcgggacccaccgaatggcggggctgaaagagctgtaacacaaacagggctgaaacacgccccctgctcaccacgttgtgggcgacgagaaggagagaagagctgtggcccttcggggagcccagacctaggagctccccgagccagggctgtgacaccctctttggggctctgcggttcctggcgtctccaagcttctgggcgccaccgcgttccccggtgccmrcwgtggaagctgcttgcggtacgcctggtccagccgcagccttgcacggagccggcacctgtgccggcgcctggagctgcctgccccgccgcagccrgcgtgcctggctgtgcgcagtggccggaccccacgctcgcttgctcacacacccctcaccgctccgcgcctggctcgcccttggcaggcatgggatccaggccrgtagcgcgagcygagcgcagcctgccaggccgagtgggcggaatgagcccagcgggcccaagcaaaactcgggcaaaggcgccaccggccacagaggtttccggctggvraagcgacaccccaaggatcccgtgaca

SEQ ID NO: 186 - DNA, 1746 bp, Homo sapiens
  repeat_region (1)..(1746): mer52b
tgatggcagcggcggcccgtctggagtggccgctgccatcatgccggctgcagcagggaggcgcggccggggctgcacgctccatggagccagcgggagccggggacaagcgggagccccgccccttccgagttggggcgggagctccccgggtgcagctgcagccgcccaaaccgcagctgcagacccgggcctccctgtgctcttgggggccgggagcaggcaggagccccaccctcctgggtgcagctgcagccgcccaagccgcggctgcggacccaggcatcyctgcgctctkgggggsccaggaaggcccccctgcccccacaggcttggagccgcccgctcccactgcagctggcctctccccgctcccggggcccgctccgcaggctcagaagtgcctgctcccactgcctggcttctccctgctgccggcacccgctccgatctcggagcaaagttggggccgagcccgggcgctgtcgcagcccggccgggtgtgcacacgctcggggcagcgctgacacgccagccccctgccgcctcggccccctccagactttgggcgccgacgagcatgggagggaagccragggggggctgagggcagctcggcgctggcctgcaggcgccccttggcacsaacagcctgggcgccatgaatggcagcaggaggcagacaggytcctgggcagaaaggggcgggtccccggtgaggccccaccttcaggccagggagggcctgaaggctgggggccgggctgccagtcccgcggaccrgagtgggaacttgtggtgccttttctgggcccacccatggccgcccatggaccaatcggcacgcacttcctcccctctgaggcccataaaagccctgggctcagccagagcwgagcagacgacgggacgaccagctgcagagaggagctacccactccggggtctcctctctgctgagagctgcasagwcgwcgggatgacctgcctgcagagaggagctacccactccagggtctcctctctgctgagagctgaacactcgtcgggacgmcctgsctgcggaraggagctacccactgcgggtctcctctgagctgttctatcgctcaataaagctcctcttcatcttgctcaccctccacttgtctgtgtacctcattcttcctggacgcaggacaagaactcgggacccaccgaatggcggggctaaaagagctgtaacacaaacagggctgaaacatgccccttgctcgccacgttgtgggcaaagagaaggagagaagagctgtggcccttcggggagcccagacctgggagctccccgagccagggctgtgactccctctttggggccctgcggttcctggcatctccaagcttccgggcgccaccgcgttccccrgtgccagctgtggaagctgcttgcggtgcgcctggtccagccgcagccttgcagagagccggcacctgtgccggcgcctggagctgcccgccccgcwgcagccrgcgcacctgactgtgcacagtggccggaccccacgctcgctcacacacccctcaccgctccgcgcctgactcgcccttggcaggcatgggatccaggccggtagcgtgagcygagcgcagcctgccaggccgagtgggcggaacgagcccagcgggcccaagcaaaactcgggcaaaggcgccaccggccacagaggtttccggccagaaaagcgacaccccaaggatcccatgaca

SEQ ID NO: 187 - DNA, 1278 bp, Homo sapiens
  repeat_region (1)..(1278): mer52c
tgatggcagtggctgctgccatcacgctggctgcagcagggaggcgcggctggggctgcacactccatggagccggtgggagccccgccccttctgagttgggacgggagctccccgtgccactgcagccgcctaaaccgcagctgcagacccaggcctcctgctccacggagcaggcaggagccccgccctcctgggcggggctacagccacccaaactgcggctgtggatccgagcctccctgtgctcttgggggagccgggagcaggcaggatctgccytcccgggtgcagctgcagctgccscacccgcggctgcagacctgggcctcycactccaggragcaggcaggagccagggacaagcgggagccccgccccttccgagttggcagggcgggagctcccgggtgcagctgcggcctaccctcccaggcgcaggacctgggcgtctctgcagcctgcacccttggggggcccaggaaggacccwccccatccctgcaggctcaggggtgtctgctcccactgcctggcctctctctgctcctggcgcctgctctgatctcggagcggggttggggccaagcccyggggccatgaatggcagcgggaggcagacagattcctgggcggaagggggcgggtccccagtaaggccccaccttcaggccagggagggcctgaaggctgggggccgggctgccagtcccgcagaccagagtggggactcgtggtgcctcttccgggcccacccatggccgcccatggaccaatcggcacacacttcctcccctctgaggtccataaaagccctgggctcagccagagcagggcagaggatggccagaggacaaagrgggcagagagacaatgggacwggatgaccagctgcagagaggagctaccctctctgctgatagctggagaygatggracgaccagctgcagagatgaccagctgcagagaggagctaccctctctgctgagagcttcagagacctgcagagatgacttgcctgcagagaggagccaccctctccagggcctcctctctgctgagagctgaacactcgatgggacgacctgcctacagagaggagctacccactcctctgagctgttctaacactaaataaagctcttcttcgtcttcttcacccttcacttgtctgcgtacctcattcttcctggacgcaggacaagaactcgggcaaaggcgccgcggccacagaggtttcccgccagaaaaatcgacaccccaragatcccgtaaca

SEQ ID NO: 188 - DNA, 189 bp, Homo sapiens
  repeat_region (1)..(189): mer53
gggttgccagatttagcaaataaaatacaggatgcccagttaaatttgaatttcagataaacaacaaataattttttagtataagtatgtcccatgcaatatttgggacatacttataactaaaaaattattcattgtttatctgaaattcaaatttaactgggcatcctgtattttatctggcaaccc

SEQ ID NO: 189 - DNA, 902 bp, Homo sapiens
  repeat_region (1)..(902): mer54
tgtagtgaattcttataattttatgttgcctcggcatccattttgaatataagtttaactttctcataccagaagcagggctyagtcacccttgacacggtttccagttctccacctcctcccagttcctcaatgtggtcgacccagatatctgccttatacmaccgcctcctggkgaccacctccctatggaacagctggatacaacctacttgacttgccccactgacccccacaccccacatggactgtgcaggtatgccacagtgaccacctctcagtcacagcgtgaccccacggaactcgtgcctgcttgctctaaacccaccaattagaactccccgcgggaaacctgcttgggtaacgccctggaccccaataaaggctttggtcccacaggtctctctctctctctctcgttctccccacccgttggttgagcatgcgtgtcccggacagcttcccccttcccattggccctgcgaggcatgctgccctcttctctctgggatctgtaagtaataaactgcttctgttatttcatgtgttttgttgtgctgcctcctctgtgtctcacctgaccgacacacccaaacctaactctcttcctggtcagggctctcctagagagtggctatcttggcaggaataaactggacacaggtcagacaagagccacaagggcgtctgccagtgtaaacaagtttcctgtgagagggacacctggtcacgggtcggacacctaggcattaggccgtccgccaggataaagaagtatcccgtgaaagatacactgtaaacacccacaaccamcttccctggagccccatcagggcagggctagagtttatagccactctccagagagagacctcaagaccaaattagaggaaaatacaaca

SEQ ID NO: 190 - DNA, 790 bp, Homo sapiens
  repeat_region (1)..(790): mer54b
  misc_feature (4)..(4): n is a, c, g or t
  misc_feature (241)..(241): n is a, c, g or t
  misc_feature (354)..(354): n is a, c, g or t
  misc_feature (501)..(501): n is a, c, g or t
tgtngtaaatwcttataattttatgttgcctcagcatccattttgaatacaagtttgactttctcataccagaagcagggctcagtcacccttgacacggcttttagttctacaccacacccaaatggctcaagccggtggccagagataaaaacttggaggcatctctcccgcctggcagactgggctccccactttcccgccgcttcctttaaaaagaccattcaggcatttgcccgcnaacttaaagtgaccacaccctgttcccttatatatgctgctagctgtcatgctctctctgcctgactcttcattcctgcctcgcgtgacccggggacggaggactgccctccngactcattgcaccctccctgtccaggacctgtaagtaaaaatctttgaacttgtttcctattgtggtggtgtattgaatttgcgccttccatctgaagaaccaggggctgccccaggctgggttttccccgggatgccagggagaanacaaggtcaggctcccagtgccagagcgatggtcaggcaggcataaactggacacgggtcagacaagagccacaagggcatctgccagtataaacaagtttcccgtgtgagggaccccctggtcgcaggtcggacaactaggcattaggccgtccgccaggtaaaagaagtatcccgtgaaaggcacactgtaaacacccacgtccagctccccttcattttccattagggcagggttgctagctgctctggtactggaaccccaatttagctgggggctctcaaaaca

SEQ ID NO: 191 - DNA, 398 bp, Homo sapiens
  repeat_region (1)..(398): mer57a
tgttaaattaagtttagcctaaagctgcctccttacatattttaagttcggcctaaaggtttctctgtacatagtgaactataacctaactggaggtgtaaacagaccgtagcctactcttgtgccaatcactgagtttcggccaatcacaggcagccaactgttcaaaccatgttcaaataaggcaaatgccgagctgtaaccaatccagctgtttctgtacctcacttccattttctgtacgtcactttcctttttctgtccataaatcttctaccacatggctgcactggagtctctgaacctactctggttctgggggctgcccgattcgcgaatcgttctttgctcaattaaactcttttaaatttaatttggctgaagtttttcttttaaca

SEQ ID NO: 192 - DNA, 434 bp, Homo sapiens
  repeat_region (1)..(434): mer57b
  misc_feature (179)..(179): n is a, c, g or t
tgttaaagcaagctaaatatagcctgagaaggactccgtacttctatatttgagtccttgtggatgaactgtaacctagcttaataggcagacaaggttgaaaacctaacttaggagtatgcgcctgtaacaatagctgagtcttggccaatcccagcggccatacttcaaccactcanagactgctaagtgttcaaaccgtgttcaaataaggcaaacgccgacctgtaaccaatccagctgtttctgtacctcacttccgatttctgtacttcattttcctttttttttatctataaatttgttccgaccacgaggcatccctggagtctctctgaatctgctgtgattctgggggctgcccgattcgcgaatcgttcattgctcaattaaactcctttaaatttaattcggctgaagtttttcttttaaca

SEQ ID NO: 193 - DNA, 7488 bp, Homo sapiens
  repeat_region (1)..(7488): mer57i
  misc_feature (155)..(155): n is a, c, g or t
  misc_feature (252)..(252): n is a, c, g or t
  misc_feature (259)..(259): n is a, c, g or t
  misc_feature (296)..(296): n is a, c, g or t
  misc_feature (564)..(564): n is a, c, g or t
  misc_feature (1021)..(1021): n is a, c, g or t
  misc_feature (1093)..(1093): n is a, c, g or t
  misc_feature (1119)..(1119): n is a, c, g or t
  misc_feature (1136)..(1136): n is a, c, g or t
  misc_feature (1192)..(1192): n is a, c, g or t
  misc_feature (1435)..(1435): n is a, c, g or t
  misc_feature (1608)..(1608): n is a, c, g or t
  misc_feature (2404)..(2404): n is a, c, g or t
  misc_feature (2444)..(2444): n is a, c, g or t
  misc_feature (2448)..(2448): n is a, c, g or t
  misc_feature (2554)..(2554): n is a, c, g or t
  misc_feature (3077)..(3077): n is a, c, g or t
  misc_feature (3250)..(3251): n is a, c, g or t
  misc_feature (3291)..(3291): n is a, c, g or t
  misc_feature (3304)..(3304): n is a, c, g or t
  misc_feature (4750)..(4750): n is a, c, g or t
  misc_feature (5567)..(5567): n is a, c, g or t
  misc_feature (5601)..(5601): n is a, c, g or t
gatggcgtcagaagcgggatccgaagtagagcttctaacgacccccgggagcactgagcgaccaaagcgaggtasctgcwggacmcacttgtgtccattgatctctcggagcagctggggatcatggtaagttctctctcggatttcggagctcnacggatttgtgtttcgagctctccgagtttctttgagcaaatttctgatccaaactgggtttggaagtcgtgacagaaactggactgggtccaggantggattngatccggtaattaaccggcttggatccagttagaggnctcttacatctgactgggtcagaaagaaactggtagtaaatggtaatattgcagggggtgtaaaatttggcttttgaaaattcgcggggatttttgtgttctacccctttgtttcatttttcttgcacgcttaggtaggaaaaaatcattggctaagttgatcaagggaatctgagagtaaagccaatatttgaggtaaaaatgggatccttaatttctgaagaactgagttccttctggcttatacgcgcacaagtgttaggccccnaaagcggcgaagtcttacagaaatggcgaaatcttactaaagataacttasagtggaacgttccgaatgaacgacactgcactgaagtgcatttgaaaatgagggctcccaaattagtctcatctagggatgcctattgatatgcagaagcttctaaaaakatttcagtatttttatttaaagactttatgaaaggcaaataaaaagcttaagcgactaattgattwwaaaattaaatctgctaaccttttagcttagttactatcctcatccaaaggaaacagactgcagcaccaattggctgactttgggtaagtagtggggtacattttacctgagtaaaggatgggattgggttagaggccctcccctcagtaaagtccctcttggttaaaaatggatttggcactatgggatgttaaccgctattctctttggattaatctgccttgtactntttgctgacggctgtgagtgacaggattaggcatgtacaggaccatgggacatggggaactttttyctcctnaaaaggggaaacttgagagctgatgngactgctggaaaagatnccttcgtgaccgacaagcggccgcctgaacttttgattcagtgtcgctgcgagtgngtctttctctggcctccctgagctcctcgccttccccaccccgccacaggcaatgcttttctcccttcctctcctttccctttcctatcttttctgttactcagggcagccatcttgcccagagaccacatgttaaatctcctggtgggtggttggattaaagatgacagggcccaaccgggggcaagtttgagccttgccagttcgatattgggcgctgagcggggtggctaatgtctatgntttgtcacatgtattttgctctggccggaatggaaaatgttaatttggttaccccatgcarcccgttgggcggcatcttgcaaaattgagaggcttttgcctgtggttccatgaaacggaaaaagatgattttcttttgtgatgtggcttggcccccagagctatggcgcggngagctgggtcatcaaagctgctcagggaaggggaacccagaagcctggcacgctggcaaaagggtaagaatttcttaccagtcaggcttctggcctctctctctctgtgcaaactggytgaatgaatggtaaaaatcactgtttatctcctctgcaaagttttgattaatgggaaaaaggattcgcgaggctagtcttaagctgtagcgaatctggtgtgctttgtgcgtctttctgtgtcgttctgtcataaagaggggtaccttaggatagaacacgggcttaaaaccccataagctcgctgctcaagacggcccagcaagctggtcagtaacaaactttgctgcaggtccctgaaacaaacaaaaaaactggatgaggtctccatcttgttttatgtctttgggagcttgaccttgtaaccgtgtggcggtactttctcttggtctccgccwtccagggaacaggaattttggggttcatgtcatagttagctctaaaaattatcttgagtagttaaaagcctttgcaagctcaaaattgactgctctagactccttccgggaagggcaacggagactgcccagtgctgtagctcagcagctaaggcttcgccattttacaatggtggcccgggttcaatcctggcttagggaatgagtactttctggttgatatctgtgtgacctttaccatttgttgattctcttcccctccacgaacaacttctagctttccttcttgaattttcctttctctgagctacccttgaagattctagattttgtagaaactncttaccacctctttgaaaatatctcgtacactcgtggttnagtnataaccttagttgaggcttgttggtttcacctgggaggttacttttggtaaagttcaaargccagaaatattggccgtttggcccggctaaagtcgggtaataagnaatttaaaaggacttttwcttaaagagcgctgtggttaaaagtcagcttaattaaaagtggatatccaagctatacgtatatttaaaaggcctttatgtttttttttctcttcttggmtcttatttttctggaaaaggtttttttcttttcagtcaactgaattrcttttctccattttgtcttctcgccactcttgatgcacgcatgagaggacctaagataacttctaatagcctgggactcctcgggaaaaacagaggaggcgccacagaccccgttttgggaaaaaactctgttttcctcatgaaaccccaggaattgraagcggatagatccctctcaaaatctaaggctctgttctgttttgcattgtgttatctgacggttttgagttttgggggtatcagaaattacttcgcattatgagagagctttggtgtgtaataactaggtrggaaatacacwtttagggatggctaatggcagttatgggggatactcggctctttgcacatttggatnagagaagcatgctcttggccacctggaaggtatgaaaatgtccccaccccccactgagagatgagactcccatgggggatgggctgattacaaaatgggctaattggctttgggttgccttgcaatgaaatgcatggtaaaagcattgcaccgtcttctcccatagcatttcnntctttttggggatccaggatccaatataaaaatgggaccnttaattttggggntctgcttgccttccagctgtgcctgcttattaggccctagaaactgcatgctttcctggccctgttcctcgaaggactccgccctgaagccagtaatccaattaagaaacttaaaaactggcaaatgaaaaatcttacaactactggatcttcttcaagagctctgattaattggcttaaagaaaaataagcgcttaaatcaaatattttgwmagaaaaataaaaactstaatgccttttagytcacgtgactttagtaatctttgggaaataaaaacagttttwaaagattaytggtaaaataaagacatttggtctaaattaggcaggtcagatattaggtttgctaaatgctttaaggtcataaactgcttctttgacttttgaaaattgttcaacttacctgctttggagccattagattctagataaggcctggggacatgtggagttagccatgcccctagctatgctggaaagagtcggaccttatctgcacttctgtctgttgtcctaggctccaaacctagtacataattaaaatcacttaccaggtttttcaccaaaaataaaaattgctaagagttaacattgtaacatgtaattgagactactgaaaaaaacagttttacatgcaaggtgtgtgaggaaagtgaaatgtgcttttggtaaaagattataagaaggcatgggaatgtacatttttgcctagtttagagggttaaaggattgttttaarttagataggataaagctgaargtttgagcaagttgtggaaggtttgtaaaaattaatcttgtaaaagaaattctgcgtgtgaacatattggctaaatttaaaggggtattattcagttttttccgtaaattgaacattgraataaaagcacaacagggttttcttagagcactgatctgctctttaacaaaaatttgtaaagggttataaaaggtttatgagaatctcaccttatggtcaaactgattaagattggatagatttgtctataaggttttattaaaaattggggttgacattaatagtatactaatgcaagggtgaaatttggctttctctcttgaacgagattttcatgtaatattaaaggataatgaaagatttttgtttgccttttgaataaactacwggaaaagaagggaaagacaagagacagatcgtttggaaagctaagtctttcctctatcaatgagtaaaggtttttgcctttttaaaatttktgagtcatcattttggcgaaatgaatgacttatggtgacctggaattctatttcataatatcaagtgttttaaacctttaacatatttgacaggcttctcaaaatcaaatttcagcttcaaaattaagtcttttttgacctctaactttgggatgctacagagggctcctgaagcatccaaaagagagataaacaggattatttganatgttaagttacatgggaagcatcgtcaaaataaaaataatgtttaaccttcttcaggttatattttagtgaataatattaatatatgttccaaaattttatgggatttctaaaattctgatatgtctgagtatatgctatcaatcataattatggttattatgttaakttattgtagaccacagaaataaccaaatttccttgtcaattttgtctttaactwcgactatttaaagtcatttccacagktaattgcttaatgctgatgcagtttctgaaaatttcacaagcacgcaaaatcctagaatatggtgtcttttaggaggttcgtgaaaggatggaaaggaccccgaaaagcgctcttgaatacaggtttctaataactttagaatcgcatcatttggactgggtaagaattcctggaactttaatgaaaagactgactggtttataaaactgctaacccaagtagaacaaaaattaattgaataccaagaagatactttgccagattatcatgctaaatcagccaatactgaaattgtttagatatacaatttgaatgaactccatggtctaagtcaaatgacctatgataacccatcagttatcagtgctatgcacctaaatcggagaaacaactggtattcaagaggacataagtccaatgttaagcatggactcatggagaaccaggacggctgccttgtccttcctgagtccttaaagcttttgttattaaaagttctgcattccatgactcatcatggaaaagataaaatgatccaaattaaatatatattggtgtggtgacttntacattgctaaaatagtttatgaccaatgtttgntttgtcaaacccatattcctgggaagacaatcaaagcttcaggtacattcggctacctgatgggccatttaaacatttatagagggatttcattcaattgtcattttcaatgcatgttttctggttgtataaaagctttcccatgcaagagggstgatgttataacagtagattattacgccacagtgtattttcaccaggtaaagaaagctttttatgattcactgactgaggacaatcagccccttcacaatctagaacccaaagactggatcttctgagaacatcagagaaagactgcccttgccatccacactgcagcaaaacttcgggactttgaaccttgggttcataatctcacaactgagaagggtccctccacactcttggaactgtacacccgttggaacccttaaggtaaagctaaccagggaagtttctccccagaagaagatgscatccttgatgtgaacagcttttcccaagatcacggatcaagacttctctactatcatgagactcttatctttaaatatttttcccttgcttatgcctctatgaacaatagaagtgaaaagggggtctgttgtgtgcacttatgtggtatacttttattcgtgaaggattttgcagccagccttatacgtggataaccttataccttgatagatgaaagatgaaggcccaatgtaggtgagaaactttaatggtacatacattgcctcgtaatcagtcagaaacagaacgttggttcactcctcttaacccacatcatgggttaaagagaacgttgccaggaggccttcactcttctagaagggcatcattcgttaggtcmtttttccgtggtttggagtaaaagaggcaatgattagaaatgtatccctcatgataggctctatagcagattctactgtaaaggctatggttacacaacagactttaaattctcttgtgaaagttatgctaaataatagaattgctctagattacttactggctaaacagagaagtatctgtgcagctgctggcgcttgtggcctatggagaaatacawcacattaggtattatasagattcagttgtaggggattaacgaagagaccgcttagttaagcgagtagactctttatctagctcattctttgatctatttgattttaggtggtttggtttatggggaccctgggtaaggagcatactccaaactcttggtattatcctcctaatagtcataatagtagtctccctggtgcgctgtattctctcgaaggttttaaatgtttgcatgcagccatctctagaatgtcaaatggtctctcttcaactggaatgacaagagctgaaggaaacgtgtgaccatgagggcaccataacctatgaatgacatgctgagaccagaaacccaaaatgatggtaactgagagtggcgctaaggccctaagttttggtcacactctcacctaagtgagaacctgaccaaaaagggggaattttttaaaacaaaattatgggaggccattgttttggactgagctcatgcactaggccccaacagaccaraccaaaccaaaatggagtcgctcgtgctaaatgtgacataatcaaactaagactttaaggaaacacatagatcctagaacagaccaggttttgtttttctcctgtaaacagaatgttccagcataaggaggtaccctctactctaacccttacaaaaaaawaatgacctgaagtccttgttcccaccttgcaaaacccactgttctactgtttcccagtgggtttcaagaccaaataagtacatttatgatggtgatagtgacatcaatgactaaagttttggtcaatctctcaaaattgagaaaatgaccaaaaggggggaat

SEQ ID NO: 194 - DNA, 189 bp, Homo sapiens
  repeat_region (1)..(189): mer5a
cagtggttctcaaagtgtggtccccggaccagcagcatcagcatcacctgggaacttgttagaaatgcagattctcgggccccaccccagacctactgaatcagaaactctgggrgtggggcccagcaatctgtgttttaacaagcyctccaggtgattctgatgcatgctcaagtttgagaaccactg

SEQ ID NO: 195 - DNA, 178 bp, Homo sapiens
  repeat_region (1)..(178): mer5b
  misc_feature (58)..(58): n is a, c, g or t
cagtggttctcaaccytggctgcayattagaatcacctggggagyttttaaaaatccngatgcccgggccacaccccagaccaattaaatcagaatctctggrggtgggacccaggcatcagtattttttaaarctcyycaggtgattccaatgtgcagccaaggttgagaaccactg

SEQ ID NO: 196 - DNA, 866 bp, Homo sapiens
  repeat_region (1)..(866): mer6
  misc_feature (225)..(226): n is a, c, g or t
  misc_feature (273)..(273): n is a, c, g or t
  misc_feature (345)..(345): n is a, c, g or t
  misc_feature (409)..(409): n is a, c, g or t
cagcaggtcctcgaataacgccgtttcattcaacgtcgtttcgttataacgytgatgagraaaaaaatcgattcccggccggggccactgtctgtgtggagtttgcacgttctccccatgtctgcgtgggttttctccaggtactccggtttcctyccacatcccaaagatgtgcacgttaggttcaytggcgtgtctacatggtcccagtctgagtgagtgtgnntgtgtgtgtgagtgtgccctgcgatgggatggcgtcctgtccagggntggytcccgccttgcgccctgagctgccgggataggctctggccacccgtgaccctgaamtggaataagtgnrttgraaaatgaatraatgaatgartacgaattattataaaataaaaatttgtaaagtctatgntaatcttacacatacatgacaatacatgaaatggtaagaaagtgatcagtgagcctgccatatatgttattgcttgtttctgaactgagtggtgggaggaggtgttcctaacaatgttcactttgcagacatttatttctttatttaatccattatcactatgaccactgtcattcagtkattcwccaaaaattgggtaaataattatcwtryttgtttttattaatctttcttaaatgtatgtatagctcacatttatttcagtgtttaatattagaagtgttttgggtctttatttagaagtttggtgatgtttttgtgaccagaaatatgccataggaacttaactcttgtttatatcaattagcctrtggtaaaattggtttcgttatacgtcgtttcacttaaagtcgcagtttccaagaacctatcaacgacgttaagtgaggacttactg

SEQ ID NO: 197 - DNA, 837 bp, Homo sapiens
  repeat_region (1)..(837): mer60
  misc_feature (338)..(338): n is a, c, g or t
tgcagrttgctagtgccagagggagcaaagaattgtgattgtggattttaattgctggcagctccctgaaggactcacaagtctttttttctcggctgaagtggttcaaaaacatttaaaggcacatttgctggagcaagggacaacatgrgrcaagcaayagatagaccaaaaagcctaagaaggaagagmtgagaaataagatgcttggggaaawaagggctttgaaaagtccacatattcctgggaatctagaaggccatgcacatgtccagggctggacacatgctcagaaaagacctaagaaggccctaagctttcacctctggctgaccttnagactctgtacaagcaggaagtgaaggctaaggcagagttgtaaactgccttggctgagtgttgaaggaatgccycaacacacagmcaatctgcaaagactaggagactttttttttgtgtttggtddtkttgttgttrttccaggtatttaaggaaayctctgtcaawyactagctgaccactaagctaaycgarcagagacttcagtggccacacatgacaaagaatacagactttacaaaattagtttagaaaagtcactaaacaaacaayacaacagcamayaayaagcaacaacaacaaaccctggaaaggggagagaatctgatttccagagttgccacattatawtatttaaaatgtccagttttttttttcaacarcaacaaaaattatgaggcatacaaagaaacaaagaaaagtatggcccatacacaggaaaaagaaattaatagaaactatccctgaggaagcccagacattgracttactagacaa

SEQ ID NO: 198 - DNA, 354 bp, Homo sapiens
  repeat_region (1)..(354): mer61
tggtagtgagacagccagatgggaaggggtccccggagaaactccaaccggcctgcgcactgggaggartgcgcactggggtggagccacagaagttcgcgccatttgcagcggggaggagcctggcccctcctcttcctgggtggaacctgggattcgaactgcgaggcgggaagtscactagcaggaarcacagtctctcrctttgctgagrgtccctgtttccccttttcttccttttcacysaataaaaycycgycttactcacccttcaaattgtctgcaagcctaawttttcgtggccgtgtgacaaggaccccgtctttagctgaactaaggaaaagtcctgcaaca

SEQ ID NO: 199 - DNA, 425 bp, Homo sapiens
  repeat_region (1)..(425): mer61b
  misc_feature (195)..(195): n is a, c, g or t
tgatagagacaggaggcagccaagggtcccccggtgaaaccccaccttcaagcctaaaacagcctgaaggctgaaaaaccagactgctggtcccggatgaagcccaccctttcctgactgattctctctgaataatgcccacctgcgcactgggaggacggggtggagccacgggaagttcgtgccttgtgcagnggggaggagcctggcctcttctgttcctgtgtggtggcctggggttcaatctgtgaggtgggagcctgttggcaggactccctctcgctttgctgagagttgtttttcctttttccttttcgcccaataaattctgctcctcacccttcaatgtgtccgcgwgcctaatctttcctggtcgtgtgacaagaacccagttttagctgaactaaggagaaagttctgcaaca

SEQ ID NO: 200 - DNA, 434 bp, Homo sapiens
  repeat_region (1)..(434): mer61c
tgatagatgcaggaggcagataagggagggtccccggagaatctccgacccgccccacaagtgtttacatcagatgcttttgtgcagatgagggaacctgcccagggccttgtctgggcatgcccacaacgaactggggggcccacctgcgcactgggagaatggggtggagccaccgggaagttcgcgccttgtgcagcggggaggagcctggcctcttcagttcctgtgtggtggcctggtgttcaatctgtgaggtgggagcctgttggcaggactccctctcgctttgctgagagttgtttttcctttttccttttcacccaataaattctgctctcctcacccttcaatgtgtctgcgtgcctaatttttcctggtcgtgkgacaagaacccgggttttagctgaactaaggagcaaaatyctgcawca

SEQ ID NO: 201 - DNA, 5217 bp, Homo sapiens
  repeat_region (1)..(5217): mer61i
  misc_feature (192)..(192): n is a, c, g or t
  misc_feature (334)..(334): n is a, c, g or t
  misc_feature (463)..(463): n is a, c, g or t
  misc_feature (1627)..(1627): n is a, c, g or t
  misc_feature (1901)..(1901): n is a, c, g or t
  misc_feature (2623)..(2623): n is a, c, g or t
  misc_feature (4829)..(4830): n is a, c, g or t
  misc_feature (4833)..(4834): n is a, c, g or t
  misc_feature (4839)..(4839): n is a, c, g or t
tttttggcacccaacgtgggggcttgagaaagggtgagtgagatgcaaaccaaaaaatctttttcccttttgcttctaagccttttcatccttggacttctgagggtaggggaaaccatgcccccacccccatcactcccaggggtcggaggcctttccatggccttttccttcctttttcgggatggaccngtgagcagcggctcccccctccctcccctccctgctggggctgggacgcatggcccaagggtccccagkggcatggctggcgttctctgccacrtrtccacagagtcttcccctcccctggccaaggagttcagctccatcngacagcaattaagcttctctccctggtggaggaaccatttgcataagaataagaggttcttccccaggcatttttaaactgttttttttcttcyytttctccaccctgtcagcagttaacttttaagtnagkttttttcttttagaagatgttttactaggccaggaatcataaggatcactgtttatattctctgtaaagttttaattgtgaaaaaggatttgtgaggctggtcttaagctgtagccaatctggtgtgctttgcatgtctgtatggttcgtagcaaactttgctgcaggcctccatcttgttttacgtccttgggggcgtggcctgtaaccacgtggcaaggcttttcgtttagcctctgccattttayagtggtggcccgggttcaatcctggcttagggaatgagtcctttctggtttgatatctgcgtgacttttgccatttgttgattctcttcccctycacgaaccgccttgaattttcctttctctgagttryytttaaagsttytarattttgtaagaactgcttamcccctctgaaaatacctcatacaatggcagttaaatcataaycttaattgrkgcttgttggtttcacctgtgaagttacctttagtaaagtttgaaagccagaaatattggccgcttggcgcggctaaagtcaggtaataagggagtttaaaaggattttcttaaagagcgctcagcttaattaaaagtggatacccaagttataggtatatttaaaaggcctttatgtttttcttttcttggatcttgttttgctggaaaaaggtttttttctcagtcgactgaattmtttttctccattttgccttgccactcttaatgcacgcatgagaggggagagacctctgttttcctcatggaaccccaggaattaaaagcggatagatccctctcaaaatctgtttttgctscawytatrcctrtttattaggccytagaarctrcatgttttcctagccctgtctcttaaagggccccacccagargccaataatccaattaggagattggcaaacgaaaratcttatggctactgggttttcttctgcctgtctgtgtagttatgtatgtgttgtgtgtgtgatgtctataaaaagagctctaattaattggcctaaagaaagacaagcacttggatcaaatattttttaaagggaagataaaagctgtggtacctttcagttcatgtgactttaatctttgagaaataaaaacagccttaaagattattggtaaaaagcagatgtyntcaaaatgtaaataggtgaactaaattatgcaggtcagatgcaaggtttgctaaatgttttaaggttataaactgctttttgggttttgagaactatttgacttgccggcttcacaactggtaaggcctggggacatatggaactaaccacacccttaattatgctggaaggagtcaaaccttggctgcacctagcacacaattaaaacaacttaccaggttttacattaaagttaaaaattgctaggagttaccattataacatgtaattganactactggaaatagatttacatgcaaggtatgtaagaacagtaaaatgtgtttttagtaaaaggttattaagaaggcatggaaatgtaaattyttgcctagggtaaaggattgttttaaattagataagaaaaagctgaaggttcaaacaagtggtggaagaattgtggaaattaatcttgcaraagttctctgtgtgaacatattgactaaattcaaaagggtattatatggtttttctgtaaattgarcattgaaataaaagcacaacaaggtattcttaagrcactaatctgctctttrgcaaaatttgtaaagggttataaaaggtttttgcttytttaaaatttctgagtcatcattttggcaaaataaataayttatggtaatctggaattctatttcataatatcaagtgttttaaacatatttaacagscttcccaaaatcaaacttcagtttcaaaattgtctttcctgatgcctggctttttggatgcttcagagggcccctggagtatccagaaaagagaggtaaacaggattatttgacatgtttaggtacatgggattgccaaaatgatgttcaatcttctttaggttatattttggtraataatactaatatatgttccaaaattgtatgggatttctaaaattctaatgtctgagtatatgctatcaatcataattaaggttgttatgttaagttattgtaaaccanggagataaccaaacttctttgtcaattgtgtttctaactgtaactaccctggacattttgttattcacagacaattgttgtcttgttttaatccttttcaaagatggtttataataagctatagaactttgacaggtgctctcaaatacaggtttctgataactttggagattgtaacattggaataaaggaaaatgtacaggactcatgaagagctaaaatgttcacgaatatcaagcaaaacaagagttaactaaatggactgaactcagaaagctgaagcaatctttttgacttttgcttggaatattgctgatccttgttttgtttttcagagtcaaggaaacttattttgaactatttatggcctttaataattgagtaaggtatactcctgtgaacaaaatttggagcatgtttgtttctctctgcctggttcctctagaatttggaaactatctgtgagtattcttaacttatggcaatatagttgtttgcatcaagtgcaataagaatccatttttcttttgcaacaggacrcaattggagaaastggttattttaccaaggctttgactggaagggtatgcttccctttaaggagtcaakcttgacttgcagagccaataaaagccccktgggaaaactggcctcatacccttgtctacacagtccctgtacagggttcctgacctgtggtcagtaaagaatgtcactttctaacaggyccaggagctccaagtttatcttgggaccttaagaggagaggatcacccaactcacaggtatttgaggatacaaacccatggctgggctcagctttaaaaggtcttatctgagattccttgtggaacagagttccatcaaagccaatctaaaaggcctatgtagaaatarttattcttgctgcactttatgcaaataatcaggccaagtataagactaaagtctattttgcaaacaactcagtcctatcatgattttttttaacaaaaatgaggactggagagagagaaattatgtttcaaaacttatcatacatttgtcattaaattctaaactcattagttgtttttaagtttttgcctacattttagactaaccctgcttgttcctgtgaaccaaccagcaatctccggctgcagctcagaaagaacaaaagggatgggtaatgtagaaatctggatcaatattctagttctgagcaattatcctgcaaatcctgccaggtgatgggaataaataggatgcccatcacttggaggtttcctttttgggaaagtaagaccaagggagctaaccaaagccaagcaccatgcacccaaatcttagcaagcataactatagccaccagttatctgggtrtgtcacaagacatccttttctctcccttgttggaggaggactcaattccacagtttcaccttagcatttagcttatgataaggagtccatgcaacccccccgagacacatttttgtcccaaactcaattccaagcttygggtcaaagccctaggaaggaaaactggatctgagggatccagaggcagatgataacagaagttaaaaggcacagtgcaggtgagcatggctgattcctgccgattaagccaagcttcccgtttcatggataaaggtcatgttagtatccatggcataaatgaggtctagggaattcaaggctactgacagcaggggagatagggcatacgtgggtagagcggataattcccatcccctaggcccccctgcttcatgggtgcaagccgctttgacacccatggtggcacctgccaaggtcactgggactcggggatgcaaggacggaagagggaaagaggacgctcttccttctctccctcacgtaccctgggtatctgctaggaagagaagggaaccagggatgcctgctcccctctttctagatgggtagccattcatcttcagtctgtacccctttcgaatgcatcctgaacccctgggactcctttgaaaaaatgccttcttttttcctttttcctcctctgttctctcttcactgataggtaattgtgtctccatactatgggacactcccctcagatgcatcctccaaactggaaagagttaatttcccaaaccttaaactggttggcttaggattgggctcaggggaagggaacccagaagcccaacatgccggcaaaaggtaaagtttttttttnnttnntttgntttttttttgtttttttctttttgtttttttaccagtcaggcttttggcctccctctccctgtgcaaactggtaaaaggccttgggatttttgagctgtccttacccctccccttgtttcattttgatacatgttttctaataacctggtttgtctgttcttgccttcaggccatcaaactccaaatggtcatgcaaccrgagcctctgacaatggccccttctgctrggaacccttagataggcctctgagggagatctgactgccgttttcccaaaacagtgccccctgtcagcaggaagcagttaagattggtcttcgtccttatccttatccttattctaatggcagttagatgtacttctttagaggggggaa

SEQ ID NO: 202 - DNA, 211 bp, Homo sapiens
  repeat_region (1)..(211): mer63a
  misc_feature (47)..(47): n is a, c, g or t
ccagtggtgtgctggtaaatgtttaacaactggctctctgggggarngaaaaaaccctgatttgtagcgtttgccgatttccgtggtgtaaatactcccaccgtggccgatttcaagctaccaacgtgatgtcactgaatgsggagttgggaaaagatatacacaatcgactctcgtgagccgatacgagccagctccagcacaccactgg

SEQ ID NO: 203 - DNA, 439 bp, Homo sapiens
  repeat_region (1)..(439): mer63b
ccagtggtgtgctggtaaatgtttaacaactggctctctgggggaaagaaaaaagccctgatttgtagcgtttgccgatttccgtggtgtaaatactcccaccgtggccgatttcaagctaccaacgtgatgtcactgaatgsggagttgggaagagatgcacagtagcacacyattatatagtatttccaccatacagatacaatagacgtaaataacctcaagagcatagataatagtaaaatgtagtaaaataattaggaagtgatgagttttgagtatttattacctttgtttttaatataatttatttaattgtaagtttatataatttaaatttctttgtttttaatataatttatttaattgtaagtttatataatttaaatttcaatcggctctcgcgagccgatacgagccagctccagcacaccactgg

SEQ ID NO: 204 - DNA, 938 bp, Homo sapiens
  repeat_region (1)..(938): mer63c
  misc_feature (271)..(271): n is a, c, g or t
ccagtggtgtgctggtaaatgtttaacaactggctctctgggggaggwaatgymtkgatttgtgtattcacatatataagtttattataaattttactgatataaaggacgtrtagcacacaatttacaaataacaataaaatatacaatattctttattgtaaattccatatagccagttgattctcacagaatgctttcgttgatttttgcccaaactcttgtatccgtagccgaactatgtttgtaattgacgaacaagtgtagttcnaacatgaatgttggttgatattttcgtttatgttaatgagtaagatgaaagtgaaacaacgaagacgtatgtcagaacttcactcatttgtcaatgatgtgagtgacttctttgctgaatcggatggtagttttcaaacattagaagaatattttctcaatttttggtgctattcgcaatgtaacagctacagacatgacacacttttaagtttaatctgcatcattaacattttctccatcactttcttaagtctagacaatcaacaaaacaataaatcaagccctgatttgtagcgtttgccgatttccgtggtgtaaatactcccaccgtggccgatttcaagctaccagcgtgatgtcactgaatgsggagttgggaagagatgcacagtagcacacyattatatagtatttccaccatacagatacaatagacgtaaataacctcaagagcatagataatagtaaaatgtagtaaaataattaggaagtgatgagttttgagtatttattacctttgtttttaatataatttatttaattgtaagtttatataatttaaatttctttgtttttaatataatttatttaattgtaagtttatataatttaaatttcaatcggctctcgcgagccgatacgagccagctccagcacaccactgg

SEQ ID NO: 205 - DNA, 445 bp, Homo sapiens
  repeat_region (1)..(445): mer65a
  misc_feature (173)..(173): n is a, c, g or t
tgtgaaagttgtcagaatcaaaatggagtcacttatgttaaaaaccctaacaaayagagccggggaaggccatgaagagagggttctcacgcwcatatgcctgataacaagaactatcacaaaagactgcaaaaaccacaaccttgcacaaaggccatcacaaccttacacanaaaaatacttctacgaggacatctgcccagcaactgcctgtccaacctcggactggcgtcacccttgttattgatccttgtagccaaggataattatctcaaaacaattatgtaatcctcctcatttttcctttaaaaacctttgtcttcctttacctccctgaatatgcacatagtttactatggcacgcgtattcccattgcaatgctctattcccaaataaatatcattttcttttagagagcctctctgtttgttatttaggttgaca

SEQ ID NO: 206 - DNA, 531 bp, Homo sapiens
  repeat_region (1)..(531): mer65b
  misc_feature (173)..(173): n is a, c, g or t
tgtgaaagttgtcagaatcaaaatggagtcacttatgttaaaaaccctaacaaayagagccggggaaggccatgaagagagggttctcacgcwcatatgcctgataacaagaactatcacaaaagactgcaaaaaccacaaccttgcacaaaggccatcacaaccttacacanaaaaatacttctacaaggacatttgcctgacaactgtctcacraacctagctactgcaagagcctactgtaactctaagattacaaatcctacctagcaactgccgacactcgccaatcagagctcgccagctcttstaagacgctgctagcgccaatgaactttctttcaaaacaayttgtgtaaccttctctttccttaataaaaccctaacatttttctttgttctctggacataccgaaggccacctggtctgtgtgtatgccccaaattgcaattctgttcttcacatgttattcccaaataaaacgttttaaatttagggattcgtctctacattttattttgacttcgaca

SEQ ID NO: 207 - DNA, 461 bp, Homo sapiens
  repeat_region (1)..(461): mer65c
tgtgaaagttgatcatacgaattgggtcattcttgtcatacccaactaaaaccagggccgaggggcccagggggaaaaggcactcggggcgcatagcattgctccaaaatataattctctgcaaccctggctgctgaaactgcctgttgtaacctgaaaccagttttatctaacagctactgaaacaacctactgtgactctaagactagttttacccaccaccgtcactcaccaatcagagcttgccagctccccaaaactttactagtgccaatgaactttctttcaaaacaatatgtaacatttctcttttttataaaacctccaaccttctctttgttctttggacataccgaagaccacctggtctgtgtgtatgccccaaattgcaattctttcttcccaaataaaacgttttaaatttagggattcgtctctacattttattttgacttcgaca

SEQ ID NO: 208 - DNA, 4871 bp, Homo sapiens
  repeat_region (1)..(4871): mer65i
  misc_feature (818)..(818): n is a, c, g or t
  misc_feature (826)..(826): n is a, c, g or t
  misc_feature (833)..(833): n is a, c, g or t
  misc_feature (932)..(932): n is a, c, g or t
  misc_feature (1246)..(1246): n is a, c, g or t
  misc_feature (1253)..(1253): n is a, c, g or t
  misc_feature (1328)..(1328): n is a, c, g or t
  misc_feature (1510)..(1510): n is a, c, g or t
  misc_feature (1518)..(1518): n is a, c, g or t
  misc_feature (1635)..(1635): n is a, c, g or t
  misc_feature (1776)..(1776): n is a, c, g or t
  misc_feature (1780)..(1780): n is a, c, g or t
  misc_feature (2016)..(2016): n is a, c, g, or t
  misc_feature (2048)..(2048): n is a, c, g, or t
  misc_feature (2050)..(2050): n is a, c, g, or t
  misc_feature (2054)..(2054): n is a, c, g, or t
  misc_feature (2056)..(2056): n is a, c, g, or t
  misc_feature (2081)..(2081): n is a, c, g, or t
  misc_feature (2090)..(2090): n is a, c, g, or t
  misc_feature (2119)..(2119): n is a, c, g, or t
  misc_feature (2123)..(2123): n is a, c, g, or t
  misc_feature (2139)..(2139): n is a, c, g, or t
  misc_feature (3639)..(3639): n is a, c, g, or t
  misc_feature (3726)..(3726): n is a, c, g, or t
  misc_feature (3742)..(3742): n is a, c, g, or t
  misc_feature (3757)..(3757): n is a, c, g, or t
  misc_feature (3809)..(3809): n is a, c, g, or t
  misc_feature (3849)..(3849): n is a, c, g, or t
  misc_feature (4000)..(4000): n is a, c, g, or t
  misc_feature (1051)..(1051): n is a, c, g, or t
gaccaagacagtgttagaaatgagttcaaaatgaactcacctcagacaaatcttgacctctggaattgaatgcagcaatgactgagtcctttgtactctctattttcgtgagttccttttctgccctggcgaatcttctctcagattctcagactccctccctttggtgagtccttttttactttattccagatctgatttagttaaaagaccactttaaataaagaatcttacatcccttctgggaccataagtcttttttgacaagcactttctgatataaagacaaggatccttctggtttgagaactctagtttatattctgtctgtgagacatttattttctggtaaattcacttttgtttctttgtgcctgctgtgagacatttattttctggtaaattcacttttgtttctttgtgcctgttttaatattttgtttgatgtataaacctggctaaaaatttttgtgaatattctgattttggtgtcattttggtttggttacatgtgtctgtaaatgatttggctcttttttaccttatttgtttctaaacatcttccaagagcaaaaataaccattctaaatggtgagtgcaagacagccaattaaaagctagtagggtagtcgacgccatcgaaaataccagtccaaactcctgacattccctgacagtactgataagattttctctggtctcaagaaaaaaaagaacaggattctcaaaattctaaggcacgccaagtcttctaggactctagccagctatacattatggtctattctcgtgcgcgttytwmaactgatgggcaaacnacatcarnaaaaacncagaactyaaacggcmattwtctstctaagcttrtyaaaaactrcaaccaactatagagttaacatggagmrycttcatawgytctytgtctctctctnttttttctacccgctttgaatctgctgacttttctgccagtattaagataaactcattgcttatgggatttcagccaagattttytaaaaagagtytcaaaggactttcaaattaatgnctttacaaattacaacagctccatggcaacmammaacctagacaccytttggaaatgtaaattkaggtttgcctarctaacaattgctwagggcgatggaacagytaattaaaagattgatagtctaaaaagraaagaactagataaatgtttatraaagytaarggctstcagatcaaacaggtcaaaatcttnagctcanagcaataataaaaggtatctctgtctgrcataaaaattgctttstctgccacataggrgccagaaaragctgaanaaaaawaayaactgtaaatatctttttgaaaagtgcctttcccacgttaactagtcaaaccagactaacaaaaaacagatttgttactaattcaaggycatctggaaattttgtttttcttatacaattcagccagtcctagytaaaatgtaaacatttgaatattyaacctctaaactcanttgaatcnaataaaaggawwaaraggtttttaaaaatcaaactgccatgraaactgctttacccaaaattttggtccacagccttcattrgattacctatcggggcaaataaagcttagccacgnaaacargtcccattttgtcaaaaatataatttggatccaactgtcattttataaaccggcgagtttrtattactatgttttactgtctcatgactaaaattctaaaatgaaagctataagatctttgtgtatgtatgyatncgtntytatgtatgtttacayatattrtatgtrttgcatctaswtgataaaatctgacatagttarccagaattcccttttaaaaattctatttagattggcttaggtaaacgagcactcatrwaaawtatatagtaattaacccaaatgctttttagttcacgtgacttaagtaaatctttgataaataagtcggttttaaatttgttaataaaataaaaataaaaatatcttcaaaantgtcagcatacatttttgycyrggtttactgntnaganangattatatttatctctactagatgntttaaggtnataaaagtataaatccagmctaaaaacanaatnatctttgtttgtatanctttttgataagactaagactaattcgataytgttagtttaatgaaaacaactgtatyttctgtgttatcggcaaaatgcccatrtatttaagtttrrggctcttacttaggtgaacacctgatattcacaggctataaaaatgrttaamarggaaataacttgaaatgacgactagctttgtytamtatcttagttttcataagtaatcyagrtataattrttaaaaatgaataaagtacgtaaacgtaaatgagataaatgtgtgtaggtgaaaattctgtatagtttaaaatcttaaagttatgctatgttaaattaaatgatactcataaaatgtctaagtcatttccaaaattatatgaaaagcattttcaaatcataagtggtaaaggatgctaaacctttgctatgttatatttatggatatgttactgatatgattgttccagaaattgtataaaactctcagaaacctaatatgccataactctagttattatgtcatataccacagaagtaatgaaccttttatgtgagctgtgttatcataatgaattctcatcagagttttagccatagtcatttaaaatctttatcattcattgttattgttttgatttttctctaaaagcatttgcaatcactacatccaaaaatgcttccttttcaaggagatttatggaaacgatcgtgacaagaactctttaatacaagtttctgataaatttcacattataccaccgactgtctaaaaattcttcagaactctaataaggaaacagatgaatttgtgaaactacttctcagtgtaccaagcagggaaaaatattgatttcattgaaataattgataactgatgaggataatgttttttatgatttttatttgaaaatttgctgattctttacttaaatgttttgttttccagatctatggaatttttttcttttaaactgtttataacttacagcaatctggtaaagtatacttctgtgaaaacaaaagtaaaaacatttgctttttctccctactcgatccctccaaaatttggcaactattcatgagaattgatatgtttatggtaatacagatatttgcacaagtacagtaacagtctgctccctctttgtagcaggatacaactgagaccattggttatattaccaaggctttgactgggatgttatattcaagatagaatgaaccaatatgaactgcagggcaaagtctgaagtcaaccttggtttaagggttcctagacttacagcgggttgtaaaagtttaatctgagattccttataaaaacttagagcaaagaaaattttaaaagagagcctacatggtccattgtctgccttggtttggcttccctaaagaatcagaccatgtttgaagtaactcaacctattttgcaaacaaacttattctactgaaattatcattggtaaaactagagatgcccatagagagaaaagttatgtttctaaagaaaaactgnaatacgcctgttattagattgcagccctgtgcattgtttccgwgyttttattatcyacmtgwagackggacwwkaccccgaattctnctagyttcctccaatncmattttctcccatngaatcactaagarmaagacctactctgttcctgaagccctataagctgaagntggamaactcgatgtaaatwtcmwgggacaaamtctcgtncctgatgtgtgggccacacmragagttcaccaaaccgctcgatgccataaccagagacactcaaactgcaaaccaggacaagaagttgacggcttcacgctgtggacagtttttcccaagatgtcagaacaagactccccatcataatgangctcttacccctcttaaytktcctttcttatgcctgcctttttgacttggcaggataatggtgtaattgaaatttcacaatcagtagcttctgtcagtaacctcacagaacctgacctaagagatccttcagcccccctagtgggtgactttgggaacatccctaatacaactggtgctcactctgctttaatccaactcagtcatgggacactagatgataaaattgctctaaattatctattggttaaatcaggaaatatctgttctattgctaatagcacatgctgaacctggataaattcccctggggaacttgaggccccatatacacgaaattacaaaacataggttataacaggtcacataggttataatgggtctcacccaattccctatggtcatttgatttattcaactggttgtctttaagcctaggttcatagctcaaaactattatgaaaactgggggtatcatattactactaatattaatttgtattttccttttaacaatttgtacttgttacttgtgaagtctctgcagaagtacaactcctaacagaatcgtgctggcccagcgcgtccagatgatggccaaaagaccacagaacagaaaaaatagaatttaacgatggacttcaggtagacttagtctgagtgcaactctctccaaatttccactttgctcaaatgtggctaaatgagctctgacactgactcctggtcaccagtcacttcctgatgatgtggaaccagaccacaccaaactgggacagctccatcccagcaccaaggggcaatcaaagcctgactgcaggatgactggtcagctatgcttttggagaaagatctcaattaaaagggggaaa

SEQ ID NO: 209 - DNA, 478 bp, Homo sapiens
tgagataggaggtgggactcgactccggaggcggggcttgaactccagaccagattgaagactagctgaaacagggccagggcaaaagcacctctccataagacacacccaccggtgccawgtgagtttaccattgccatggtaacagccagaagttactgcccctttccatggcaatgacccggaagttaccaccccttttctagaaatttctgaataacctgctccttaatttgcatgtagttaaaagtgggtataaatatgactgcagaactgcctctgagctgctactctgggcgcactgcctatggggcagccctgctctgcaaggagcagtrcctctgctgctgctgtrcacagccgcttcaataaaagttgctgtctaataccaccarctcgcccttgaattctttcctgggcgaagccaagaaccctcccgggctaagccccaatttgagggctcgcctgtcctgcatca

SEQ ID NO: 210 - DNA, 486 bp, Homo sapiens
  repeat_region (1)..(486): mer66b
tgaggtaggaggtgggactcgactccggaggcggggcttgaacaccagaccaaattgaagactagctgaaacagggccagggcaaaagcagctttccataagacccacccaccggtgccawgtgagtttaccattgccatggcaacagccagaagttactgcccctttccatggcaatgacccgatgacccaaaagttaccaccccttttctagaaatttctgcataaaccgccccttaatttgcatgtagttaaaagtgggtataaatatgactgcagaactgcctctgagctgctactctgggcgcactgcctatggggcagccctgctctgcaaggagcagtrcctctgctgctgctgtrcacagccgcttcaataaaagttgctgtctaataccaccarctcgcccttgaattctttcctgggcgaagccaagaaccctcccgggctaagccccaatttgagggctcgcctgtcctgcatca

SEQ ID NO: 211 - DNA, 6676 bp, Homo sapiens
  repeat_region (1)..(6676): mer66i
  misc_feature (154)..(154): n is a, c, g or t
  misc_feature (194)..(194): n is a, c, g or t
  misc_feature (196)..(196): n is a, c, g or t
  misc_feature (377)..(377): n is a, c, g or t
  misc_feature (881)..(881): n is a, c, g or t
  misc_feature (1094)..(1094): n is a, c, g or t
  misc_feature (1099)..(1099): n is a, c, g or t
  misc_feature (1297)..(1297): n is a, c, g or t
  misc_feature (1983)..(1983): n is a, c, g or t
  misc_feature (2265)..(2265): n is a, c, g or t
  misc_feature (2761)..(2761): n is a, c, g or t
  misc_feature (2777)..(2777): n is a, c, g or t
  misc_feature (2944)..(2944): n is a, c, g or t
  misc_feature (3001)..(3001): n is a, c, g or t
  misc_feature (3281)..(3281): n is a, c, g or t
  misc_feature (3297)..(3297): n is a, c, g or t
  misc_feature (3305)..(3305): n is a, c, g or t
  misc_feature (3339)..(3339): n is a, c, g or t
  misc_feature (3341)..(3341): n is a, c, g or t
  misc_feature (3403)..(3403): n is a, c, g or t
  misc_feature (3566)..(3566): n is a, c, g or t
  misc_feature (3658)..(3658): n is a, c, g or t
  misc_feature (3705)..(3705): n is a, c, g or t
  misc_feature (3761)..(3761): n is a, c, g or t
  misc_feature (3764)..(3764): n is a, c, g or t
  misc_feature (3843)..(3844): n is a, c, g or t
  misc_feature (3847)..(3847): n is a, c, g or t
  misc_feature (3933)..(3933): n is a, c, g or t
  misc_feature (3961)..(3961): n is a, c, g or t
  misc_feature (4110)..(4110): n is a, c, g or t
  misc_feature (4139)..(4139): n is a, c, g or t
  misc_feature (4174)..(4174): n is a, c, g or t
  misc_feature (5316)..(5316): n is a, c, g or t
  misc_feature (5762)..(5762): n is a, c, g or t
tctggtgaccacgaagggacgaagacggcaagtgagagagagtgagagagccgagatggcaatcggtggagagacaagatggtgagacagtggcgatgacggcaatcagtgatcagtggagaggcagcaakcggcgagagatggtgagatggtnatcaaaagctgcagagcaataaccctgaggctgtaacaananagagctgctaacaccgcagagctgtaacactaaccaaaggctcttttcagagccatcatttttcctggcgggcagcggagccgagcggacaggcaagtggccataatactgccgcctcgtgtgggacccgctgctctgaccggcaggccagtgggttaccggtccccgcgcttgcccctcncgctgtggcagctgagcccacccaagctgagggaacctggggaagaccttcacccgggtcccacgtggaagaccagtcagcaccattttggctcctgtggacgggtgagtgtcccctctgatcccmccccataatatcgggtaaactagagaataaaagcctttggctaggtggtcagttaaaagtcccccatcgtttgggtgccccgagacacatccttgtcaccccttcccctggtcctttctcttctgactccattttattgctccactagccattttattttcagtcctaaaatgtatgttttgtttgcagtcttatttttgcttttgactttctgttgactgtttgggcaattgtttaaggcaggacacttggttgtgagaggtcccccattgtgttgactctgggacgccagagtcacgttgttctgtgaccccaactaggcctttggggttcactgttggccaccccacagatgctccggggttttcggcatttggngaacccctggawactctggggtttctggcatttggtgtggggaccctcattggcttgatactcaggtactccgggttttcagcattcggtattgttggccgccccctggatgctccggggttttcggcattggcattcctttcaggactgtgggttagagtcccatcctaggggaatcttggtcttgccttttctcgttttctgccctaaagnttatnattttctgtaacagcattttcttttcctattgtcactttatttacacttttccttctacactttgcttaataaaaacmcttttttgtcgtatttcattcactggcaaatactcataatccgcttttataataccttgctacctatactttgacagaaagtgggaatctaaaaggaaaaagtaacaaaggcccagttgnttttgctctcgctagacttagaaaaacttctgtgtccwgtagagatccttactagacatggggacaacgatgagcatcccagaggactcgccactagggtgtcttttaggcaattggagcaaattcaaattcagcttagagaaaaagaaactcattttctattgcaacaccgtttgggtccaatacaaattggaaaaccaacagatttggcctaggcatggttctttacattataatgmtattttacaattagatttattctgtaaaaaggaaggaaaatgggaagaagtcccttatgtacaggcttttatggccctctaccaggatcctgacctaagggmtagctgtagaatgtgtggctcatgwtacttccaggcaccaggaagctacaccagatatgcctaaaggaccccctcctagctgctccccctagaacgcctacgccctcccttcggagcctcctcagtcccccagttctgagaggggtcctaccagttctctaatacaggattccaccccaaggtcatcaggcacccctcctccttatccaacaagccccggcctataccccccgctgcccaaggaagtaagcccaaccagtaccaccaggagtggggccccgtatcagcccctaaaatcaaacctgtgtccattgcgggaggtagctgatggaaataggagaacantcagagtatatgtgccwttttccatgtscgatttggctttatgcaaggaaaaatttggccagttttcggaggatccagggaagtttatagaggagtttgttaagttgaccatgtcctttgatttaacttgkcatgacttgcaaatattattatccgcttgctgtaccgtagaggaaaaacaaaggattctaggtactgcccatgaacatgcagatggagtggctgtgtgtaacccaggccatgccatttactgtgtgggaggagatgcagttccagatctanaccttaagtgggattaccagagaggttttcaagatcttgaatgcagaaatcatatactaacttgtttagtagaagtggaagaaaaagtgtgtggttaagccagttaattatgacaaggttagagaaataactcggggaaaagatgaaaatcccgctctgtttcagggccgtttggttgaggcactcaggaaatatactaatacagacccagactccccggaagggcgagctctcctgggtatgcattttattactcaatctgcccctgacattaggaggaagctacaaaaagcagcaatgggaccccaaacccctgtaagccaactcttaaacatggcctttgggtttacaacaatagggacagggcagagaagaggcgaaaacaaaagaaatagccaaaaagcgcaattgttagtggctgctttaggccccctgccgcctcagggttacccacctcgagaaaatgtcgtgagatcggcgtctaggatgcccaganaagagccccccactcnccagcccctgggccaaaatcagtgtgccttctgtaagcaagagggccactggaaawaggatttcctaaccgwccccagtgagmtcggaaagcwtcgcgtcaataccagagctaacctccttccgctagcccccagmgagctgccttgcccaagtaaatttactaagngtctgggctcttgacctaatggacagcctcccamagcggcatacaagtggccgcttnaacatttttcttcagtgtctccactgccgggtaggttctctggcgastcggggcctccgaggtctccccttgagcaatgcwgttcaccctgctcccttccttatktgatgctatgkgatcwtcttccctgcctcttcctgtcttccatacctactggkgcwaacaaaatttggccaggtaggtgggtcccaawtttgtaaataacttggatccagttgcctwgtatakgtcattttacttkgtgtgtttaagtstmtgtamaggttwaatgtgtgctgtntttagcaggctatcanattggctnagaawtaaaagagtgctcgtgaattaacacaagncnagtctagacttattcgtttgaaaaatgttacgtcttctaaaatttaactctaagatttttanctaggtaaatcactgatgtgcataggctttaaaatggttaaaatggccamwggtcgttaaattcgcatgggaccttggttcttggaggtggtctaaacatagctattaaaagtaaaaatgttaaacacatgtgaatggaatagatgcttaaatagtgagcttnttgtacggtttaaaatcttaaaattgtaaaatagttctcatctatagaatkccaatgtctggtgggcagttcaggatttcttgctccctagntttatataaaatgtgccaaagaaatgtattttttattgggaaaaaangttttcgtctaatttggaagttattaaaagggaggttcaaaatataaggaaaccantgngtagaaaagagagatataaagaatgttatggatagaaaatgtattttttgcaaagaatatataaaaaagagtaattttnnatnaagaggaatcttgtatagtaaattcttgtcctaaagtaaaatgaccggttatttaagaaagaggtagtataggacaagtaagaaankccaagcatgttgtagatggtctgtgtnagtcatgataaggttcatgaaggggaatttataaaaagaatttttgtgtatgattaagcttgctataattaaaagaaaattgtttacaatagactttctaaagaatggtctacgtttkaaaaccgaattttcttaaggtattaatttgntaaattaccagaaattttgtttttcaatnctgtaakctagttcttttgaaagcttctcagcganttcatgtaactctmtcctttagctttttcgtcagctcctgtgagttttttcctctagttctgttgttgtggcctgatgctaaagtgttttgtcttagaggtctgtgggagcagtgttttcccccagtatagtttctattgatataatcttatttttggcttttagtttttgactcttacattgcttagaagggttttaagggctaatgagtgcctgcccacctccattcccgtctggcctagaacgtttaattggctataagtcttttgactctaagtcccttggscaaaggaaattccaaagaaacttaaaaactaactcaggccatgacaggaaacagggggttagacatacctcactatgccccctttwmaatttaggctaggttcacaaggcccttcaagaatatggaaataaagtattgcctctcacaagacttagtcttactaaaaacttaaaaagaaggatcccctgaggatcaattacaaccaaaatggaagggccctatcgggtattgttaagtacccccactgctgttaaacttcagggaataactagttgggtacamctgtccaggattaaacctgtttcttatgagtcacaggcacaaaaggaggacaccatgacctacatctgtgaacctttggaagacttccactacctatttaaaagaatcaacactcagccagaagtggtaacgtgatgctgtgggtgggaataggagcattaatttttctcttcttcctgattgtaatacttcttttctatcgctttagccaaccaccttctcctgggaaacacctcttttgtccttgttgggtgtagaggccactctaaggcccaaccggataccatgctgtcactgttaatcctgtttgctctcccaattaccctgatccagtgtgggtgggaacaaaactctatagtaaatatttcaaaaattatagcatcagggaatcatcttcatggttgctggatttgtcatcaacatccccaggatagagagttccatcttctggcctatccggaaaatctcacagccatctccccagacctcctaactaaccatagcaatcccgaagtacccaaacccctacttgttaagtggaactctcccccacttaacggattccacctgaacntccccmaccactattacctggacctgggaagttgggtatctatatctccagtgcactaatgattctatcttttgcacccactgttgtgttaatgacacaaaagcggaagtttccctgcgatgctctgatccaactctagttgccaagttcccaaggccgcagcaaggtaaatgggattccacttgtaagcgaggagaccatatatggtgccttctcctggatcagaacatacaggggaaaaacaactgcctaatctgggaaggtgggagtaccgcccccttctggaaaacaaagattgttcgaccacccccattggaacaggggaagaatatctctatagacccaacttggcagcaaagaatagacatcacaccccgtagggcctccgtttgtgccccaactgggctcatttttgtttgtggccatgaatgggaagaagtcacacnccgtaaccactcccgactccccagggagccacctgttcttttaggagtagctttcccttgtatatcaaaaacttggaacagaggtgaatgtacgttggccacccttgcccctccaggggtcacagtctataaccccataagacccaggaacaccagaagtaaacgagcaataggattaattctggcgggaatcggggcagcaataggactagcagcaccctggggtggctttgcctaccacgagtcaaccctaaagaacttgactcaaaccctagaatccttagccaccaacacaggtcaggcactaaagagaattcaagagtccctagactctttggcaaatgtagttctcgataacagactagcattggattatttactagctgaacaaggtggagtctgtgcagttattaataaaacctgctgcacatatattaacaactctggacaggttgaggttaacattcaaaagatctatgagcaagctacctggttacatagatataaccagggcactgaccccaactatatctggtcgactatcaaaagtgccttcccaagtctcacctggtttttacctctcctaggacctttgatagctgtcttgttattactaatttttggcccttgcttgtttaacctcttagtaaagtttgtgtcttctagattacaacagttccaggtaaagacaatgctggcacaaggcttccaacccatcccgtctactgacccggagaatgaaagcgtcctgcctctgggccccttagatcaggtatccagagatttttactcctccggtgctaggcagggcctatgcccataaactcagcaggaagcagttacagaagatggacctccgcccttctgcagcccccttaagattaaggaggagtatctaatctctgaggggggaa

SEQ ID NO: 212 - DNA, 543 bp, Homo sapiens
  repeat_region (1)..(543): mer67a
  misc_feature (375)..(375): n is a, c, g or t
  misc_feature (386)..(386): n is a, c, g or t
tgacaaagattctctccttgaccaaactctagccaggctcctctgagcccccttctccactaggcctcaacctcggcctataaagacttgaacaaacactaacatagtttctaatagctcaaggccacatccctaggatgaccctagcccccccttaaagtgcctgcctgagaaaactcaaggctgccaaaataatttactgtttgttccagccaacacctgaagatagggcccctgtctcccagtctctgtgggagggtaggagcctaacttcgataagcgccagttagcaaacacagatgggctaatcacattkacactgwccaaccttttgtaatttttcacttccctgactctactgagcccccacgcgtnccctctccccnctccctcattctccctttaaaacgcccagtcacctctgcacaaatcgaagctgagctcagttcacgctggactcttttccctactgcaatagtatattactgattaaaatccgtccttaccgctttaactagtgtccggctttgtttatctttgaca

SEQ ID NO: 213 - DNA, 661 bp, Homo sapiens
  repeat_region (1)..(661): mer67b
  misc_feature (414)..(414): n is a, c, t or g
  misc_feature (507)..(507): n is a, c, t or g
  misc_feature (518)..(518): n is a, c, t or g
tgagaactgcagaactctcggcacagaacaactccatccaaacccctgcactaagagacttgaccaaactctagcatggcttctagcagcataaggccgcgtccctaggatgaccccagcccccccttaaagtgcctgcctgagaaagctcaacgctgccaggagaatttactgtttgttctagccaacacctgatgataggcccctgatctccctttcttagagcatttactaaaaagggcttacaattgtgaatccttcctctgtccctttgagatatgtatgtatctcctacaactcaggagtgtctttctcaaggacctgagagccattcctttgaaatgtaatcatcgagaaggatagggcctctgtctcccagtctctgtgggaggatagaatcctaactttgataancgccagctagcagacacagctggcctaatcacattgacactgaccagccctttgtaatttttcacttccctgactctgctgagcccccacgtnccctctccccnctccctcattctccctttaaaacgcccagtcacctctgcacaaattggaatggarctcagctctttcccctactgccagtagttactgaataaaatccgttttcaccgctttaactagtgtccggctttgtttatctttgaca

SEQ ID NO: 214 - DNA, 710 bp, Homo sapiens
  repeat_region (1)..(710): mer67c
  misc_feature (36)..(36): n is a, c, g or t
tgtaagggcaaatacaaattaaaaataagaggcttnaattctccctggtgcgaaaagagaaagacaccctcctctcccttttcttagagcatttactttagaaaacttgtaattgtgaatcctttctctgtccctttgaaatgtatgtaaatctttttaaaagctaaataagcctcttgccagctttacgacccaggaatgtctttctcaaggacctgggagccatctctttgaaatgtaawcatcaaggaagatagtacccctatctcccagtttctgtgggagggtaggagcctaacttcagtgggcaccttgctccaagttgcaaaactacctcctgtcataaagatatgagaagtttatttttcctttggataaagccaattagctaacacagatggccaccccaattaccaggtgaatttaggatgaactatgtgtgacaaatggtgctgtcaagtcctcttacttgaggactagttattgtttatcttgagaacatgtatgtaatgggctgtatctgctcggctatataaaagggtgagatttctttctgtstttgcaatctcttagcagattgcctgtgatgcgcatcacattctggtttaatgcttattcaataataaaacgtgttttctttctcttctacctttgtggagaggttttctgggttgggagragattttgtttttaattatatttccccaaca

SEQ ID NO: 215 - DNA, 514 bp, Homo sapiens
  repeat_region (1)..(514): mer67d
  misc_feature (279)..(279): n is a, c, g or t
  misc_feature (397)..(397): n is a, c, g or t
  misc_feature (412)..(412): n is a, c, g or t
  misc_feature (427)..(427): n is a, c, g or t
  misc_feature (488)..(489): n is a, c, g or t
tgaccaagacagccttaacgttcccctcagcttgactraactttagacaggtttcttcctgactataggcccctgacctcccttttcttagagcatttactttagaaaacttgcaattgtaaattctttctctgcccctttgagatgtaaatcttctacaacccaggaatgtctttctcaaggacctgggagccatccctttgaaatataatcawggaaggacatagggtccctgtctcccagtctctgtggaagggtaggagcctaactttgataagnagcaattwgcaaacacagatggcctaatcacattgaccaacctccccaccaacgtcctccagtacttttccactagctcaccccagcgcttaaaaatccacctgccttttgtttcagnggagttgagttcaanctctaacccctattncaatagtctctgtcctttattgcaatagtcttgaatgaagtcttccttgcctgtttaacanntttccggtgcaatttttcttttaca

SEQ ID NO: 216 - DNA, 563 bp, Homo sapiens
  repeat_region (1)..(563): mer68a
tgtgcagaaaagagttaacatagcaggcctgagactgctatccttagaaaggcctgcttgcaaggttggcccttggctggcatctgggaacttggatttcgggagggttcccaccattcccwkaactgataagagtggctcactgtgcctaaactgtttgtgcaaacaatatggtttatgctgaacacctgctttccttctgggagtctggaattttggtacgtgctaggcagagggtgcctacgtgaccagcccccartaaaaaccctgggcactgagtctctaatgagcttccctggtagacaacatttcacatgtgttgtcacaactcgttgctgggggaattaagcgtgtcctgtgtgactccactgggagaggactcttggaagcttgcgcctggtttcctccggacttcgccccatgcgccttttccctttgctgattttgctttgtatcctttcgctgtaataaatcatagccgtgagtatgactatatgctgagtcctgtgagtcctcctagcgaatcaccgaacctgggggtggtcttgggaacccctaacaca

SEQ ID NO: 217 - DNA, 568 bp, Homo sapiens
  repeat_region (1)..(568): mer68b
  misc_feature (461)..(461): n is a, c, g or t
tgtgcagaaaagagttaacatagcaggcctgagactgctatccttagaaaggcctgcttgcaaggttggcccttggctggcgtctgggaacttggcttttgagagggtccccaccgttcccttaactgataagagtggctcactgtgcctagactgtttgtgcaaacaatgtggtttatgctgaacacctgctttccttctgggagtctggaattttggtacatgctaggcagagkgtgcctacgtgaccagcccccaataaaaaccttgggcgctgagtctctaatgggcttccctggcagaaacattgcacacacgttgctgcattttattgctgagggaagtaagtgygttctgtgtgacycctctgggagaggacmywkggaagcctgcgcatggattcctccagactccgcctgatgtgtcttttccctttgctgatcttgccgtgtatccttacnrtgtcgctgtaataaatcttagccatgagtataactgtatgctgagtcccgtgagtccttctagcgaatcaccgaacgtgggggtggtcttgggaacccctaacaca

SEQ ID NO: 218 - DNA, 179 bp, Homo sapiens
  repeat_region (1)..(179): mer69a
ccagaggcagatttaccgtgaagctaatgaagcttaagcttcagggcccctcacttgcataggccccttccaaggccctgtacctaattttgtattcgtaattttgtattctttttcttaaagagggccccccaaattgtataagcttcaggccccacaaaacctggatctgcccctgg

SEQ ID NO: 219 - DNA, 1501 bp, Homo sapiens
  repeat_region (1)..(1501): mer69b
  misc_feature (800)..(816): n is a, c, g or t
  misc_feature (743)..(743): n is a, c, g or t
cagaggcagatttaccgtgaagctaatgaagcttaagcttcagggcccctcacttgcacgggccccttccaaggccctgggaggggccctagcaatgtgttcacatggtcatatgtttttgtaaaatttgcaaaagtaagatattttaaccacaattggttaagactgctgtctctttccactccgacttcccctccatcacacttcccctcatgtcgggtggtattggagtggccgtgggcatttttgggatctggctaagggaaagttgagttggggatacatttagtttgggtttagtgggatatatttatgtggttcgcagtcacttccgtgtatagttaagttattgctagccgtcccggtataggaatggcttccaggaayattcctactgcccactgtgccgactcacccagcgtcgtgacmtgaggcacaggaccggagrtcgtatcgcgatatgaacgtgtcctacggcacctggcaccggaagtatgcgggtagtggaggagaaacaaggtttgaaatgtacagagccagaagctagtctgtggaaaattcttccaatcatcagacgtgtaaaattgtaagcggaggattcggttctcatcgatgcctagycagagcagaagttctctcctgtcagaaatatactcgataatgcagcgtatacaattataaatgcamcatgcatttatttgcatttttggaagggaatcatgcgaaatagaatttatcagaantccttgtttgtagggcacagatctrtagcagtactacaaacagtgagcacatctgtnnnnnnnnnnnnnnnnnttattaamtttcttgctgatatgacatgaaatwctgacgttaacgaagataacasttcacttctaatttaccatgacaaaaaagacatcagtgacaaactggttactgagtgtcattaattctaagagyatttaagattagtcactgcacaagaaaacttgaaatgccctgaaatcttacagctcatatatgaaagaaacttgataggggtttccccaaatttgacaacaattctaaaaatttacatgacattaccaataacgagttgtgaagctgaaagaaacttttctaaactatcaataataaaaaacaaatttcgatcaaccatgctagaggaaagactgaattatctttctattctctctatagaaaatattacaaaatcgttgtcatatgaagaggcgatcaaagagtatgcagccaaaaaatgtagggaaaaartattatagaagtgtgtcaggcagttaattaataaaaatatggtgttgtttttctggattttgtgatgtttgtggtatttgtcaactttttaaaatttgtaatttgttgcgatttcttttctcattctaaataaatattcacttttgtacctaattttgtattcgtaattttgtattctttttcttaaagagggccccccaaattgtataagcttcaggccccacaaaacctggatctgcccctg

SEQ ID NO: 220 - DNA, 597 bp, Homo sapiens
  repeat_region (1)..(597): mer70a
  misc_feature (99)..(99): n is a, c, g or t
  misc_feature (143)..(143): n is a, c, g or t
  misc_feature (159)..(159): n is a, c, g or t
  misc_feature (437)..(437): n is a, c, g or t
  misc_feature (460)..(460): n is a, c, g or t
aagcagattcgctaattaccagtcccaagagaagactcctactgcgtggagaatagcgaagatcatcactatgccaaccaccaggaacttcttcccggnccactgcatcytgrgctacwgtttatgtccwccatgcactggtnacctcgcttacccgantccggtgagacagaacgcgcgcacacacaagttacgcgaagcgggtttattacttacagacaggcagcaagggacaacagaagcctaggattcagggtragyymgtcycccaaggctcaggaaagctgcccagggcggatggaatcttgwctgcgcgtgccccacttgcactgcagctgagggrccccggaaggcaccccgccctgggttttatacctcaggaacmacatgacacgctgggctaaagcgttgaaggacatcctgtttcyaggagaganwggaacagagcccaggctgttcnggccagttcctccctatctcaggatgttgcattcccagcacattctacagttattcttgagaactacaagcaagaaagaggggagwactgggtcggtccaaggccacctggrgaactgtcctgcagagctatccgag

SEQ ID NO: 221 - DNA, 665 bp, Homo sapiens
  repeat_region (1)..(665): mer70b
  misc_feature (99)..(99): n is a, c, g or t
  misc_feature (143)..(143): n is a, c, g or t
  misc_feature (159)..(159): n is a, c, g or t
  misc_feature (437)..(437): n is a, c, g or t
  misc_feature (460)..(460): n is a, c, g or t
aagcagattcgctaattaccagtcccaagagaagactcctactgcgtggagaatagcgaagatcatcactatgccaaccaccaggaacttcttcccggnccactgcatcytgrgctacwgtttatgtccwccatgcactggtnacctcgcttacccgantccggtgagacagaacgcgcgcacacacaagttacgcgaagcgggtttattacttacagacaggcagcaagggacaacagaagcctaggattcagggtragyymgtcycccaaggctcaggaaagctgcccagggcggatggaatcttgwctgcgcgtgccccacttgcactgcagctgagggrccccggaaggcaccccgccctgggttttatacctcaggaacmacatgacacgctgggctaaagcgttgaaggacatcctgtttcyaggagaganwggaacagagcccaggctgttcnggccagttcctccctaamtcaagatrttacattccctaggagggkcaagaacaaggccaasctgttccgggcagttcctccctatctcaggatgttgcattcccagcacattctacagttattcttgagaactacaagcaagaaagaggggagwactgggtcggtccaaggccacctggrgaactgtcctgcagagctatccgag

SEQ ID NO: 222 - DNA, 711 bp, Homo sapiens
  repeat_region (1)..(711): mer72
  misc_feature (20)..(21): n is a, c, g or t
  misc_feature (23)..(23): n is a, c, g or t
  misc_feature (28)..(28): n is a, c, g or t
  misc_feature (249)..(255): n is a, c, g or t
  misc_feature (309)..(309): n is a, c, g or t
  misc_feature (385)..(385): n is a, c, g or t
  misc_feature (474)..(474): n is a, c, g or t
  misc_feature (681)..(681): n is a, c, g or t
atgaagacagcgtwctcttnngnattancatgataaataaaaatraaatcctaaracccccaaccgactgarcagaccacctcttggccgaggggaccccagagwaaccttgaaarctgagttcycggccgkgacgggatggagggrtcagacacacctcgttrtacccctcccttrctaaccatsaykrggcttgcytccctaargrctaaacagaaaccagcyctttcgaaagactccagcactgrnnnnnnntcctttccttcctgrtaagagaccaccraccacggagwgkttctggccagtctncggaggatgtrcagcgagggttttcgtgtcctctgcttcaccttttgacgtcagagggccgaaaactccaccctcngatcatgctaacactgccaktttttgwacatgggwcccatgaagaggcaggaarctcaattgtgcacgcgtgtgtttctccyttcacgnatattcatgactcctcctatagcttattgaatatgtatatttggccatyccactcagcataaattcctgttccctttgccyctccctcgaaatgtctgtttctggcttctggccggaggctacgcttcccagcctgtcagaatggccgccctgcaggctgcaaccctttatgagaaataaagctctcctttccaaatttgaacctcntcattcttcagttgacaaagtrkcaaarat

SEQ ID NO: 223 - DNA, 636 bp, Homo sapiens
  repeat_region (1)..(636): mer73
  misc_feature (108)..(108): n is a, c, g or t
  misc_feature (290)..(290): n is a, c, g or t
  misc_feature (472)..(472): n is a, c, g or t
  misc_feature (614)..(614): n is a, c, g or t
tgtcataaatttgtttaatacagttgctgcctcggcatccatttttaggcctgacataagttgtttgaaacccagtcgtaccccgtcacctttggcctagttaaaacntctcctccctgtgtggttgtttgcgatatggcccacttgttcctcatctcgctgacccaaaacccaacacaccccacagctgctgaccatgataaaacctaatggtcaacgccagagtcatgtaaataagtttcctccttctggcatgttttctttaaactagccaatccacaacccccgtnggaaagcctgagggataatgcccatggaccttaataaaggcatactcccgcagctgctctctccctccctacccactggttgagctccctgccgcctccagacttcccatcggcctcccgtcggcacccctaacctctctgggatctgtaagtaatamatttcttctgtttcatgcattttngtttcacttgcctcactgtgtctcmcctgacacacacactcgaacctaactttcccccgggtcagggctctcctagaaaatggctatcttggcttatggccactctcaagagagagacctcaagaccaaattagaaagaaancataacgataaaaatcacaaca

SEQ ID NO: 224 - DNA, 624 bp, Homo sapiens
  repeat_region (1)..(624): mer74
  misc_feature (314)..(314): n is a, c, g or t
tgttttaaaatgtaggttttattatttaggtatgttraggccaacagatcaggagacgactgccattgaaaagacagtttgttattctcacagatcccaagagaagggggcatgccgcgccacggggagccccacggggaagcaccggggtcggtcaggaggcagaaggagcgacgggaaaacgtrggcaagagcctttattgtggtttccatgggaaggaatgrgcgaggcagggtaagcaggcttaggattggctagtttgaataatttcagcaggctctggggyataggggytgtccctagttgcctggtncctggccctgggatgattagggcagggggatagtggcccagagtgtaagagccaaatagaggaggtggttgggggtatgggctctggattggttggtttgcatatgaaaggcgcgctcccgggcgagtccttcgctatctctaagaattggctagccctgggaggggcagtctctccgggrtcagcaaggccccaagatgtcaaarcatyataaaatacagaaaataaaaaagcatgattaatacaakytgctctgtgatgaacggatgccaaatagwcgaatacagaatctaagaaaacacagaacaca

SEQ ID NO: 225 - DNA, 558 bp, Homo sapiens
  repeat_region (1)..(558): mer74a
tgtattaaccatgttttttattttctgtattcttgatgctttgacatctggggccttgctgaccctggagggactgcccctcccagggctagccaattcctagagatagcaaacgactcgcctgggagcgcgcctttcatatgcaaaccaaccaatccagagcccacacccccaaccacctcctttatcgggctctcacactctgggccactatccccctgccctaatcaccccagggccaggtaccagacaactagggacagcccctataccccagagcccgctgaaattattcaaactagccaatcctaagcctgcttaccctgccttgcccattccttcccatggaaaccacaataaaggctcttgcccacgttttcccgtcgctccctctgcctcctgaccgaccctggtgcttccccgtgtggccccccgtggcgtggcgtgcccccttctcttgggawctgtgagtaacaaactatcttttcaatggcagtcgtctcctgatctgttggccttaccatacctgaataataataaaacctacattttaaaaca

SEQ ID NO: 226 - DNA, 622 bp, Homo sapiens
  repeat_region (1)..(622): mer74b
  misc_feature (51)..(51): n is a, c, g or t
  misc_feature (54)..(54): n is a, c, g or t
tgttttcttagattctgtattcgtctatttggcatccgttcatcacagagncanttatattaaccatgttttttattttctgtattcttgatgctttgacatcttggggccttgctgaccccggagagactgcccctcccagggctagccaattcctagagatagcaaaggactcgcctgggagcgcgcctttcatatgcaaaccaaccaatccaaagcccatacccccaaccacctcctttatcgggctctcacactccaggccaatattccccctgccctaaatcaccccagggccaggtaccaggcaactagagaccacccctgtaccccagagcccgccagaattattcaaactagccaatcctaagcctgcttaccctgccttgcccgttccttcccgtggaaaccmcaataaaggctctggcccacgttttcccgtcgctccttctgcctcctgaccgaccctggtgcttccccgtggggctctgcgtggcgtggcgtgcccccttctcttgggaactgtgagaataacaaactatcttttcaatggcagtcgtctcctgatctgttggccttaccatacctsaataaaataaaatcccaggtacattttaaaaca

SEQ ID NO: 227 - DNA, 514 bp, Homo sapiens
  repeat_region (1)..(514): mer75
  misc_feature (86)..(86): n is a, c, g or t
cccttttcccgtttgccccgagaatactcgccggcggcgcttgcggctgcagcgtttaccccgagataactttgccatgaaatatnttgcttttattattattttcgcatcgttctagtatatcgactttggaaacaaaagacatcgttctatttatagcattctgtttttagtagtggtatttccatttacaaaatatagtaattctcgattgctgaaaatgtcaaatcctagaaaacgtagcattcctacacgtgatgttaacatcgttctcgaacagttgttggccgaagattcatttgatgaatccgatttttccgaaatagacgattctggtgattcagatgattctgatgttagttctgtttagaaataactccaagaacagtttttatattttattttcacattgaaaatcagtcagatttgcttcagcctcaaagagcgtgtttatgtaaaattaaatgagcgctggcagcgagctgcacttttttttttctaaacgggaaaaggg

SEQ ID NO: 228 - DNA, 688 bp, Homo sapiens
  repeat_region (1)..(688): mer76
  misc_feature (336)..(336): n is a, c, g or t
  misc_feature (387)..(387): n is a, c, g or t
  misc_feature (393)..(393): n is a, c, g or t
  misc_feature (514)..(514): n is a, c, g or t
  misc_feature (636)..(636): n is a, c, g or t
tgaggagtccagctcctggcyaaaaacctacgtgtgatttttcaggcctgaccataggcaattacaaaggctttacctggcaggcctcatgggggaaagctgccctccccacaccagacttggtgcacagccagtgcattgcagtctctgaagggagttgcagtcaaggactcaggcccccctggccggccacgctcttacacatatctgcattcctagcccaggcgcctccgttcggaggcctctttattcggggccttctgcagaggtcttcctcaggcgcctctgccgagacctctttatgaggggtggaagcgggagccttgaagacatttntctccactctgactcagtactcagtgcttttccactcctatcccttccctntcctcncctccatgacccacgggtccataaaactgcaggagccttttgttcagggctccctcaacagtgagatgacccccatgtctgtgccgatccacctgacccttgaccggtgccatttccatgnggaaaaatggaacatggggagtcggtactttctctggttttagcctcttgcttatactatcgaagkaagtgattaaagatttgactgttactttcattttggcttgttgccttaatcggctnctctgacacccggcagctcagctctctctccagctcagctgagctcctgaca

SEQ ID NO: 229 - DNA, 650 bp, Homo sapiens
  repeat_region (1)..(650): mer77
  misc_feature (166)..(166): n is a, c, g or t
  misc_feature (170)..(170): n is a, c, g or t
  misc_feature (335)..(335): n is a, c, g or t
  misc_feature (337)..(337): n is a, c, g or t
  misc_feature (348)..(348): n is a, c, g or t
  misc_feature (393)..(393): n is a, c, g or t
  misc_feature (412)..(412): n is a, c, g or t
  misc_feature (608)..(608): n is a, c, g or t
actacggggggaggtgtcaaattcaaaggtctccaagacmaccctcctgtttartgattcgctagaaggactcacagaactcagaaaagccgttatactcacagttacggtttattacagtgaaaggatacagattaaagtcagcaaagggraaaggcacataggncagngtccaagagarmcaggcacgrgcttccagttgtcctctcccggcggagtcgtrcgggcagcgcttaattctcccagcaacgrtgtgtgacagcacgcatgaagtattgccaaccagggaagctcacccgagccttggtgtccagagtttttrttgggggtcggtnanataggcatggntgaccccgcagcatggctgaccttggtcttctcaggcttgagccncccaagcatggctgacctnagttactcagtctycagcccctccagargtcarryaccgtgtagcctaaggcccccaccataaatcacattgttagcatrractgtccggtatggcccaaggccytcgcagataaacaaagayactyttatcaggcaggacattccaagggcttagaggttatctcccarrgcctgaggataamcgagggccaganctttctttgggcaaggttaatcctttactgyayaagaccaca

SEQ ID NO: 230 - DNA, 239 bp, Homo sapiens
  repeat_region (1)..(239): mer8
  misc_feature (19)..(20): n is a, c, g or t
  misc_feature (102)..(102): n is a, c, g or t
cagttgtccctctgtatanncgggggattggttccaggacccytgtgtatacmaaaatccgcgcatactcaagtcccgaagtcggccctgcggaacccacgnatatgaaaagtcggccctccatatatacgggtttcgcatcccgcgaatactgtattttcaatccgcgtttgattgaaaaaaatccgcgtataagtggacccacgcagttcaaacccgtgttgttcaagggtcaactg

SEQ ID NO: 231 - DNA, 508 bp, Homo sapiens
  repeat_region (1)..(508): mer80
  misc_feature (441)..(441): n is a, c, g or t
caggggttcttaaccttttttgtgccatgggcccctttggcagtctggtgaagcctatggaccccttctcagaataatgtttttaaatgcataaaataaaatacataggattacaaaggaaaccaattatattgaaatacagttatcaaaatattaaaaaaccaaatttgtgatatagtaatatatgtgcttctttattaatgcattaaataacaagatctagcggcgggtctaataactaccgtaatttcgaagtagtgatgagcataaatgatattttgagatatctgcaacaactgtaatgtgatatgaaaatatctgtgatttctattggtgacaaagtcacaggtactgctaatactactgtggtttgttgcctacattcataattgaaggaaatgctaaatttcagttagaggttagtgaaaataaagatgtaanttttttccccatccaagttcacggaccccctgaattctatccatagactccaggttaagaacccctg

SEQ ID NO: 232 - DNA, 114 bp, Homo sapiens
  repeat_region (1)..(114): mer81
tagggtgaccaaccgtcccggtttgcccgggactgaggggtttcccaggacgtgggactttcagtgctaaaaccgggaaagtcccgggcaaaccaggacgagttggtcacccta

SEQ ID NO: 233 - DNA, 653 bp, Homo sapiens
  repeat_region (1)..(653): mer82
  misc_feature (186)..(187): n is a, c, g or t
  misc_feature (544)..(544): n is a, c, g or t
  misc_feature (557)..(557): n is a, c, g or t
  misc_feature (567)..(567): n is a, c, g or t
cagttgatcctcattatccacagtagttatgttctataaagtcaccgcgagcactgaattagcgaatactgaaccatcgctcctagaggaaatacagagttaggttcctgcaagcctctggtcacaacattttcatcaaccgatcaatatataacyttgttttatgtgtgtttctgtttaaagacnncttatttaatatatattgttgatttattaacactgaactcacagccaacagcactataactcatgcctgaatgaagcttatctaacacacatattttctccataaggtacatcacagccttcttgtgcttaggaacaccagacagcacttcagcactatgctcggggccattttaaacggcgaaatcaccaacaaaaagcacaaaaatgtgaaaaacgtggcactaaatagacctcgaaaaggacgcttgtttacggtatgagagctgaaacaagaaggcagagcgtcgccttgttcgacctcagctgggaacgtgcacgtcgggcgactcgaatttttcgctgctctgcgcatgtntgcaaatgaccgngaaagtgctncaagtattgattttggggttacaaataaattttagcgagtaggcgaattcgcaaatacggaatccgtggataatgaggattgactg

SEQ ID NO: 234 - DNA, 441 bp, Homo sapiens
  repeat_region (1)..(441): mer83
tgtggagtcctaattagggaaaaggagtcaggctggcgggaccaggggaaagcaaagggagaaagcaaataagctataagtctgcctttcttcatggtccaggacacatagccctcctgcgcaaataactcacaatcttcctgcgcccaactattatcaaacacctcagctgacagaaaaatgcaagttagctcmctgcaaccttggcattatcagtactgcacgcagcmctctgcagcccaagaaccatcctataaaatctccagcaagcctttgtctccttgcagtcagctcctctcttgctggtctgcctgttgcttccttgcaacatattttcatactttctctaataaatctgcctttctttacctacaactgtcttggtaaattatttttacctcccgcgccaccggccccagatagtcgccgctccccacgrca

SEQ ID NO: 235 - DNA, 378 bp, Homo sapiens
  repeat_region (1)..(378): mer83b
tgtggagtcctgataagtaagcaacaatgaggaaggggccccaggtgggggagggccccaggtggggaagaacaatgaacaattgttctgagagacggctaatcacaaacaacccgcgggcacaacgacctcgttccgcatgtagccccagcagcatgacctcattctgcacgtagccccctccagcacgaccctataaaacttccctccagcccctgcctctttgcagacagccccttctctgctgtgctgcccgttgcaaccttgcaacgtattttcatactttctctaataaatctgcctttctttacctacaactgtcttggtaaattcctttaccgcctgcgacactggccccagatagttgcacccgtgaca

SEQ ID NO: 236 - DNA, 373 bp, Homo sapiens
  repeat_region (1)..(373): mer83c
tgtggagtcctgataagataagtaagcaacaatgaggaaggggccccaggtgggggagaacaattgttctgagagacggctaatcacagacaacccgctggcacaacatcctgttcccaaatacctcgctccgcatgtagccccagcagcacgacctcattctgcacgtagccccctccagtacaaccctataaaacttccctccagcccctgcctctttgcagacagccccttctctgctgtgctgcccattgcacccttgcaacgtatctttgtactttctctaataaatctgcctttctttacctatgactgtcttggtaaattcttttactgtccgcgatgccggccccagccagtcgcacccgcgaca

SEQ ID NO: 237 - DNA, 508 bp, Homo sapiens
  repeat_region (1)..(508): mer84
  misc_feature (133)..(134): n is a, c, g or t
tgaggagagcaaagaccacctggtgaccatcaaacaggccatccggaggcaaaactccttatctggggaatttagaagtaattagacttccctattatctaaagcaggcatctggttccaggcctctttcccnnaaaaacttataagtaactagaatttctatacgtctccggaatgcatgcatgctgaaactcactgtgcaacccttgctgacatcaaggcaccaaaatgtctacaaatgtaatcatttaccatgacctacgtggctaatatggtccaaattacccttaagctcccgctttaaggtccataaatgctcctaaggaaaaatccaccgcggcgcgctcagtcctctcttgctgaggcgccccgctgcactctkctgcagcgttctttctgtctaataaaactttcctttttcaaacctatactgttgtcggtaaattctttttaccaacccacgagtcgaccacttcccgatgccggggctctgacacctcgcctggca

SEQ ID NO: 238 - DNA, 140 bp, Homo sapiens
  repeat_region (1)..(140): mer85
cccatttatgcctgaggttgcaattttttgaatttttgcatgagtgaaaaatcagaccttggcgatgaccttgagcagtaggatataaataactcccacatgcttagcgttccaataatggaacactaggcataaatggg

SEQ ID NO: 239 - DNA, 206 bp, Homo sapiens
  repeat_region (1)..(206): mer86
gacttccgtttctagtaatatggtagactagatatcctgaaaacccttccgctacaaaacacctagaaatgctggataaaatataacaaacatccttttaaatgcatagctgagctcgcaagaaagtaagggaaatccccaggggccaaaaatgaagagagaactgaaaaccagagcggtgagtamgtgagctgacgctgtggctg

SEQ ID NO: 240 - DNA, 541 bp, Homo sapiens
  repeat_region (1)..(541): mer87
  misc_feature (347)..(347): n is a, c, g or t
  misc_feature (304)..(394): n is a, c, g or t
tgtaacagtggagggagacctagcatgactgactccatcttgcctctgacccccwgsggtawcatcctttaggctaaaagcttctgcttaktcctgcacgtaggccaagctaactatgggaggaatttagtttatagttcaactttaaaaaagatggtaacagtccctttcccaaactaacccccgaggagataaggaaagtatacacacaaataacaatgttatgttaaagatttataggaacattgtgacctgacctaggacaaagaagttttgmcaactcctcggactcttgctggcgcccagatgtctgtggtcatcggtcacctcctaaccccaataccccncttsttccccttcccctagcataaaaagaagcctaagattyatgctnatttgagatggttctttaggacgctagtctgccatcttctcggtttgctggctctccgaataaagtcactttccttgccacaacacctcgtctcttgacttactggctgtcgwgcggtgagcagtaccagctttggattcagttaca

SEQ ID NO: 241 - DNA, 612 bp, Homo sapiens
  repeat_region (1)..(612): ltr36
tgtaaccaagtacccccatttttctaagaaaaagagaatgagttttattatttttttttctyttttctcctttttcccctgttccccacttcctacttagccctttagaaatgcaattataaccttttacctccccttcaccagacactccctacagggcaagttcatctaactatgtgcttagaagctccagagcggaactctctcccaccaggagattgcctcgagagataacagtcratttacaacccaaagtatgcccgctacgaaactctctcccacctggagagttttggccacytttacaacctagttctgcccacgaaggcgccagcagtcaccagctcaaccgcctggtagataaggcaccgaagcaagtcacgtagacccccacctgctgcttcctcccctgcatgccattcatgccaagcccccttttaaaagyscctgctttctgctccaaaagcgaagcggtacccttaaggcaggaagcctgtacttcttccccctaagctagctttggaataaaaagtcactttctttataccagacctcgctcttgttaattggactctgcaagcggtgagcaactgaacctgcgtttcagttaca

SEQ ID NO: 242 - DNA, 426 bp, Homo sapiens
  repeat_region (1)..(426): ltr37a
  misc_feature (173)..(173): n is a, c, g or t
  misc_feature (231)..(231): n is a, c, g or t
  misc_feature (265)..(265): n is a, c, g or t
  misc_feature (159)..(159): n is a, c, g or t
tgtagggaaaaattgtgcttcaatggaaaactatgcattgtctagagcacacccttccgggttatctgattctagctctgtcattgtctttgagctattttacaactctgtaarttgtagataactgatagcaatgcaaaataattcttgtctataganatgcaaataaattntgtccggtrgaggttcaattgacttccttcccccactgtggaaaaagccagttttgcntcyatttgcaaattcatttcaatattcctgattncctataaatgtgtstgttctttgaattctcctttgaaccggttrtaacatcttactggttccctcattaattaatgagttaaataaaatctttaacacgtgttcattttatatytgtatgagagtcatgattttaccttttttgaaaattatcctttaaca

SEQ ID NO: 243 - DNA, 468 bp, Homo sapiens
  repeat_region (1)..(458): ltr37b
  misc_feature (131)..(131): n is a, c, g or t
tgttaaagaaaaattatccmaaacttggaaataaggcaaaaagatgacwgcatgtcctttcaatgtcatactggagcattgtctaataggctcactcaaggattatttaattatctaggggaatgtacctntgttgactttgctatttactatttgattagggcccagatactatgaagttacatgttaacttgtagatttctgtccagtagaaaagataaccycaaaggttatagttttattgccctgtaggatattaaccagttttgtatctaacttagcaatcttattccarcattcttctttactgaatgcctataaatacctagtttctcaaatgctctttgaaccagttttaccatcttactggttccctcattaatgagttaaataaaatctttgacacgtgttcattctatatttgtatgagagtcatgtttttaactttttgaaaattatactttgaca

SEQ ID NO: 244 - DNA, 556 bp, Homo sapiens
  repeat_region (1)..(556): ltr38
tgtaaccgagtatcccagcctcaaaatgcattttaaaacttttttctttttcttttttgctttcagccttgaaacatactttgaaactctttgtttctccctttcccaccaggcacttccgtgaacagtgctcgcttatctaattatgtgcttgcttagaaattccaggggccaattttgaaacaaaccaggcagagagacccagctgcagaatcctcccgcttagggggagttatgaacagttagcccaccactaccgggctgaagtcaggatgatgcaaaccagacctccagacgggcgattactcaagatagccatcggaacaagacatgcagacctccaccctcctgcaccactcccacatatttcccacaccttttccttcttaaaccccttcactcagcccaaaagtctgaaatgtcttctttgaggcatgagcctggccatctcccatctgctagcatttgattaataaagctgctttcctttcaccacacctcgcttctcatgttttgagcttctgagcagcgagcagctggacttgagccagttaca

SEQ ID NO: 245 - DNA, 610 bp, Homo sapiens
  repeat_region (1)..(610): ltr38b
  misc_feature (126)..(126): n is a, c, g or t
  misc_feature (380)..(380): n is a, c, g or t
  misc_feature (410)..(410): n is a, c, g or t
  misc_feature (413)..(413): n is a, c, g or t
  misc_feature (415)..(415): n is a, c, g or t
tgtaaccaggcagcttarcttcaaaatgcattttaaaacttttttttccctttctcttgagtttcaagatataaccttgaagcaaactgcagaagccttttctcttatccttaaaatagactccanatccctccctttctcaccgtatatactcccttcacatttatctaactgtatgctagtatctaattatgtgcttacttagaagttccaggggctaatcttgagacagacagaccaagcctggagacccagctgcaaaattccagagattacytcaaggcagctagtcaacaaccyrgccattgttgagatgaygccagcccacastccaggtggactgggacccaagatagccaccggaaaaagacacacagacnttgtactcagcacaattcttgcmagcacantkngnaatgcctyccwtatcaagttttccctttttaaacccttgccttcyccctaaaarttgaagyggttgctttggataggaatcyggccrcttccccattactagttttggttaataaagtcactttctttctacyagacctcactcttgtcaattggactctgyaagcagyragcagccdgacccatgtcakttaca

SEQ ID NO: 246 - DNA, 794 bp, Homo sapiens
  repeat_region (1)..(794): ltr39
  misc_feature (36)..(36): n is a, c, g or t
tgagacggagcagggaccccctcttaggggcctgcngggcactccccccccaagcatggaaataaaggaaaatcttgagttccttcaagggaaattccaggcacctagctagccctgagaagtaaatgagcaacttgataagcaagaaggtaatagtagcttaaaacaatagccaaggaagttagagtcacgrgatgtttggttcccctatagaaactaaagataacatcttaacatatgtccctgagttgtttttcagaaacccggacccccaccaaatggaaaatgccatccgctggcacgtagacctcagataagggggaactgaggactgaactctgaccaccgttctttgttctaaatttcttcctgaggggcctggaggaagtcacgcccacgagccagagctaacattcttttctgctgaccccaaatttttagacaaagcttcgcttccttaaccaatcgcaaatcagaaaatctttgaatcyacctatgacctgtaagcccccgcttcaagatatcccgccyttttaggccaaaaccaatgtrtaacctccatgtattgatttacgattttgcctgtaacttctgctttcctgaaatttacccctgcctttaaaaacccttacctgtaagccatcggggaggtcgggtcttaagcgtkagctgcccgattctccttgcttggcgccctgcaaataaacgccttmctttctcccgctgcaaaatctcggtgtsgatgtttggttttactgcgccgggcgagcggaccccagttcggttcggtaaca

SEQ ID NO: 247 - DNA, 588 bp, Homo sapiens
  repeat_region (1)..(588): ltr4
gaagcaggaaatataaaaggaaaaacaagtaaagggaaaacaagtcctttcctgaccagtctgactcactccaaagtcctgctggagctatgataattatctgcaaggccaggcaggggctccgaaggagggctccaggagcagggatgagaaaaacaagttctccttatcagtttccctgtttgaaattctctccccataacattattctttgttctgctctcacaactatttttgtaactatttctgcaagtctgtaaagattttgtaagttcttgtttttctttctgtagcatggcaaggtcacaagacatgtttaagtaaggtaggctcatgttgcaaatcctgttgtaaaacctgtcacggtatgattaactgcctttgttctgcttctgtaagactgctttctcacctcgcaggttttgcgccaaaaacccgacttgcccctgcctgatgcatgtataaaagtcaagcccgtctttgttccgggctcagcctttggatgttaatccgctgggccagtggccacctaaataaaaccttcctgttgcacccagtgatctctccggcctcctgatacccacaaca

SEQ ID NO: 248 - DNA, 519 bp, Homo sapiens
  repeat_region (1)..(519): ltr40a
  misc_feature (176)..(176): n is a, c, g or t
  misc_feature (243)..(243): n is a, c, g or t
  misc_feature (299)..(299): n is a, c, g or t
  misc_feature (301)..(301): n is a, c, g or t
  misc_feature (343)..(343): n is a, c, g or t
tgttgggagacaattctccatgggtctctcgcatttctgcacgtcttgtgagcagaggcactgactgcctttgttctggactatcttttcaaggatgtttgtatagcgaacagccttggaagatagagatagtgtctccctctggagcaaagggcaggtttgcttactagccttgnaarataaagataatgtctccctccggggcaaagggcaggcatgcttactgcccattataaaagattngggtttcctaagctcggggttcctcwsctgtracgcaaacccactgcgtgtgcagnantcatctggsccccttcgcatcgccctcgtgggacttgggggncaaggggaactgacgcaaacatgatgctcatgctgcctgctgtgctgtgartaataaagtcctttgtctctgacccaggagtctcgtgtcttctgccagcatccatgaaactgtggcaggctaacttgttagcttgcaagtagggtaaaatctcagacccttcacagttcttgaca

SEQ ID NO: 249 - DNA, 462 bp, Homo sapiens
  repeat_region (1)..(462): ltr40b
tgttgggagacaattctccatgggtctctcgcgtttctgcacgtcttgcgagcagagcactgactgcctttttttctggactatcttttcaaggatgtttgtatagcgaacaaccttggaagatagagataatgtctccctctggagcaaagggcaggcttgcttactgcccattataaaagattcgggttccctaagctcagggttcctctcctgtaacgcaacccactgcgtgcgcagcatccayctgggcctctycgcgtcgcccctgtgggamttggggggcaaggggaactgacgcaaatgctgatgctcwtgctgcctgctgtgctgtgagtaataaagtcctttgtctctgacccaggagtctcatgtcttctgccagcatccatgaaactgtggcaggctaacttgttagcttgcaagtagggtaaaatctcagacccttcacagttcttgaca

SEQ ID NO: 250 - DNA, 773 bp, Homo sapiens
  repeat_region (1)..(773): ltr41
  misc_feature (189)..(189): n is a, c, g or t
  misc_feature (332)..(332): n is a, c, g or t
  misc_feature (378)..(378): n is a, c, g or t
  misc_feature (399)..(399): n is a, c, g or t
  misc_feature (446)..(446): n is a, c, g or t
  misc_feature (456)..(456): n is a, c, g or t
tgtgccagttatcaatttattgcctctcagctccaaattcacccttattgcctgctctgtgaaaatggatctggaccctttaaatatttttcctttgccagctggcatgatgttaagctttgtcagtagagggcactggagagacattgcaggaggaaggggcttttcttcctggttcctgtgtgctgntgtgctwggcatgctcacttggcaggttcctgtagctcaggcytacagcttctccagtgcccagttcctgcagcgcacacagcttctctagcacccggttcctgcagcatgtgcmccttctcaagcatgcagctctggcagtntaatcagcagtgtccagcagcttcccccagcacccatcactcaggnggtttcacagtggggtgcctntggtgagatacctccctgtgaacagctttccctgacaccctagaggntggatttccnagaagttccacagggtrgatttccagcaagttctgttagtgcagtaccacagtaacttctctgccatccagtaagccatagctgtgcctttgtccaacaagatctggatctcagccctggggggaaggttctctcctgggtgctctrtctcagccctaggggtagtggctgctccttatatctgctattcctatattctttagagttctctttacctcttastagttaattccctgttatagttaatatttatattaaacttttcctgttcaaattactgtgtggtttctstctcctgattggacccagacatatag

SEQ ID NO: 251 - DNA, 495 bp, Homo sapiens
  repeat_region (1)..(495): ltr42
  misc_feature (16)..(16): n is a, c, g or t
  misc_feature (58)..(58): n is a, c, g or t
  misc_feature (414)..(414): n is a, c, g or t
tgtagggtcccccagnctttcccctcctttctttctctgtcctgaccgaaaaacagantgccttgaccactctgtgacccagccagctgcaggtttttccctgcaggcttgaacccaagccagggccttgaacattcccaggcactgataaaggtatttaggttgttgcccaaaacactgaaagaaactagccccggccctgagccaaattccttaaaccctcatataaactccataccctgaccccctcgctgcagacatacctaggtagaacatcccttttctctcactgtccatcttgaggactgctgcagcccactctgtaggtaagttcccctaataaatgctttggactgatcaccctggcatttagtgcttctttctttggaatcccaactggccccatctcagganggtttggggyactcccttgtgggaactcccctgccactgcttttggggcgactccagccacaggttcagcgggatraaaca

SEQ ID NO: 252 - DNA, 602 bp, Homo sapiens
  repeat_region (1)..(602): ltr43
tgaggcaggataggtagtcaaggaagtaaccatgtccttgggacgcagcaaccgtggtgaccatacagtcaacacaataagccccagcattcgcattgtagtcgagctcattcaagcaaagctatcttcagtagggamtttcccctgtagagagcatgcgcattttgattttacctgtcctcaaactgaccctttgctcattataatagtaaaaaacacaacccctgggtggagatttaagatgctaatgagacatgcgatgtatgaacaagcatgtacagctactgcgcatgtgcacccagaggaccacccagaacatgcttactagtaacacctctttcccacctccttatgaataatcatgtaagactcccataaagggagtctcccyagcgccartcwwtgctgtctcatccttatgagcagcccgccctgaattctctctctcagggtgtactgtctattctgcacctaactttcaaaatattctttttcytttgcaataaattrctctatgctgcatctcctttgctgtgtgtctcttgtttaaattcttttaaactaagaagacaagaaccgaggtmtcacaacagccatcaaca

SEQ ID NO: 253 - DNA, 519 bp, Homo sapiens
  repeat_region (1)..(519): ltr44
  misc_feature (223)..(223): n is a, c, g or t
tgataacctacargtcacatttggcaggcttccaaattaacccacctcagggaggtcttgtgattcatggccacatcctgtccctgagtaaagaatcttgtgagttcctcaaattttatcgtgagttcctcaaattgttgacgtactgattaatatgtaacctactgacattgaaaaggacactgatttgtttctgaatcataaagttttgctgatttatttntgaatcataaagttttactgattgttttacatatagacattttagcctgtatgttgcaatctgtagccaatgattataacctctgtattgtaccctccaatraaaaaagacaactccgatatgaggagttcccctcccttctcctaaactttcttataaaagccttccaacttgtaamagacttcggaacacwcccaactttgttggtgtgtcttcccaggtcaatcctcacatttggcttccaataaacctttatcaaattatttctgcctcaacagccttaatttcggtcgaca

SEQ ID NO: 254 - DNA, 525 bp, Homo sapiens
  repeat_region (1)..(525): ltr45
tgtaaccgcgggaccagcccaaactgggcctactctgttgataacaaaatgtcaagttaccttgtaggtataacagagcccaaaactgcaagtcatgtagcccgggcatgtgcaatagaaaaagctttgacctctaacaacacccagaaccaatgattcctcccctcggaaccaagaagaccgggacatgaccggaacctgaatgccggaactctttcagaagcaaaggggtccgttggcccggaagatctggggctaaaatctgcctcaacataccttaccgtaaatggtcaaatttgaagccctccaatcagaccctgccaagccaacattcctaaatcctttcccttgccctctgatcccttaaaacttgccccagaccccaaatcggggagacagatttgagcccacctcctgtctccttgctggccggttttgcaataaagcctttcttttctcaaaagctggtgccatagttattggcttctgtgtgcatcaggcagcaagcccatttgctcgataaca

SEQ ID NO: 255 - DNA, 489 bp, Homo sapiens
  repeat_region (1)..(489): ltr45b
  misc_feature (396)..(397): n is a, c, g or t
  misc_feature (465)..(466): n is a, c, g or t
tgtgtaaccacaccagaccaatctggttcaacttttatgtaacaaagttgtgagttgtttttcagttgccatggacccccaggttgaaggtcatgtaacctgagcatgcccagatgaaccaagygtgcaaccacagggggaacctaagtgctcagaccgaggagtggggactgaattaagaagtggacaccacatggcaggatccaggatccaatcagattgagccctggcatcaccccatggcaggatccaatcagatcatgcctcccagcatcaccctcattgcaagatccaatcagatcacacctcattaccctatgcctataaaacctgccccagaccccagctcagggagacagatttgagcatttcctcctgtctccttgctagtcgacnnacttgcaataaagcttttcttttctcaaaagctggtgccatagtattggcttcgcatcaggcagcagnnagcccattgattgcttrgtaaca

SEQ ID NO: 256 - DNA, 461 bp, Homo sapiens
  repeat_region (1)..(461): ltr46
  misc_feature (116)..(116): n is a, c, g or t
  misc_feature (161)..(161): n is a, c, g or t
  misc_feature (201)..(201): n is a, c, g or t
  misc_feature (208)..(208): n is a, c, g or t
  misc_feature (369)..(369): n is a, c, g or t
tgttagtccaaactgcaccattttgtaagctccctgctattttgcagaccttggtcaaagtgaaacattccatgggggttcrggccgtgagaaacatcctgcctaaccacctgacnacaaggcggacaaaggcccactgaagaaacatccctatcatatcntgctgggcaaagatccaaggaacaccacgatcacatyctnctggaanaagggccagaactgcctcatcataggaacatcttatcaatatcctgccgggcagcaagccatactgcccagacccctcccacccagacctataaattgccccagcctgtaagcagtggtgggctctggcattaagctggtcccccacytyyrcaggttttntgctggatataaaacctgcatttgctgtagagctgccctctctctctctctgtgtctttctttaaccctcaccttcccttcaaaacctaaca

SEQ ID NO: 257 - DNA, 452 bp, Homo sapiens
  repeat_region (1)..(452): ltr47a
tgtggaggctaaagcaactccatcttggatgctaatccaccatgttgacttctgattaaccccagttccgggaatgcctctaagatttccagtttatctattgttccttgtgtaagagcaggtacttactgtaaatcctgcccttaggtcaaaacaaccttgatgttatcatacttaccataaatcctgcccttagcaattgtcctacacattccttctgaagcacgtataccctttccctgtggtatataagccctgggtctggggggtaacggcgcggggatccaccatcttgtctcgccgccgcccaagacacagacgtggcttctgtttgtaagtccctattaaatgtttctttctgagaaactggatttgtcagcctctttcttcggcctctcagcttccttggacttttgggggtaggtttgcatagacctgctcaccgcggaaca

SEQ ID NO: 258 - DNA, 443 bp, Homo sapiens
  repeat_region (1)..(443): ltr47b
tgtggaggctaaagtaactccatcttggaagctaatccgccatgttgacttctgattaaccccggttccaggaatgcctctaagatttccactttatctattgttccttgtgtaagaacatgtacttaccgtaaatcctgcctttagatcaaatcaaccttgataatctcatacttaccgtaaaccctgcccttagcaaatgtcctacacattctctctggagcatgtataccctttccctatggtatataatccctgggtctggggggtaacggtgtggagatctacctgtcttgcggccacccaagaccacgcttctgtccgtaagttccccaataaatcaccctttactgacaaactggatttgtctgcctcgttctttggtttctcggctccttctgcgtttgggggtcattttgcatatacggccctttcacgaaaca

SEQ ID NO: 259 - DNA, 787 bp, Homo sapiens
  repeat_region (1)..(787): ltr48
  misc_feature (91)..(91): n is a, c, g or t
  misc_feature (107)..(107): n is a, c, g or t
  misc_feature (172)..(172): n is a, c, g or t
  misc_feature (244)..(244): n is a, c, g or t
  misc_feature (476)..(476): n is a, c, g or t
  misc_feature (652)..(652): n is a, c, g or t
  misc_feature (779)..(779): n is a, c, g or t
tgttggggctcagaaaataccccaaagtatggtgctttggcatgctgagtactttgaactaaaggaaattggaaggccttagaagcagccntcagaaccaaggtctntctctgaccttctcttgcctccctgtctctctgcccctctttctttccccaagcacagggagggnctctctctgaaatttccttatctgactaaggaaacttctttccaaaagaaatgcaattgtcttgaatccccntccctaggaatctcatcaaataaccaggaaagattaaccacatgagaagagaagagactaaaagtcatcaaacccasaacaccacacccagacagacttttcatcatctattcttctgagggcagctctaagagattacctgagagactttttatctgcataataagacaacctttgttcacagtgcagttctgcccctcaccttcctataatttgttctccaccacctccnccagagcccagagaaactttgtcccaggccattggtctgttctttgggcccattcatttcccctaaaaatcatttactacccctctaaaattgcctacatcccccccatttccctctcccctatgaagagggtatttaagcttcaaccatctggcccttctttgagtctcatatanattttgtatgactcccatgttcatatgcatgttaataaatttgtatgccttttctcctgttaatctgtctattgtcagttcatttcagcaaaccttcagaggggacagaggggaagctttcctttcncccctaca

SEQ ID NO: 260 - DNA, 676 bp, Homo sapiens
  repeat_region (1)..(676): ltr48b
  misc_feature (96)..(97): n is a, c, g or t
  misc_feature (263)..(263): n is a, c, g or t
tggggctcagaaaataataccccaaaatatggcactttgacatgctgaactgaagaagcagcctcaaggtctctctgacctcccccccccctcccnnctcccgtctctcaatcctctgtctctcccaaagcacaggatgaagctgttctctgaagttcccttatctacctagaaactggacctgccaaagaagaacacaattgccttcaatcccttccctgaaatttcattaactagagaagattaaaactcatatcacaganaaaaaaagactgaaaattaaacaccacacctagagcccagacaaactttgtcacaaaccattgtctgttctctggtcccattcaatttccaaagagaattatttacaagcyattgtctgttctctgggcccattcatttcccccctaaaaatcatttactacccctcaaaaaattggcctacaawtttgcctacatttcccccatctccccttcccctatgaagaagggtatataagcatctgtaccccattgggttattgggtaatcattctcctctgtgattcccccatgctatgcacgttaaaataaatttgtatgcccttttctcctattaatctgccttttgtcagttgattttcagtgaaccttcagagggcaaaggggaagttttcccttggcccctacaagggca

SEQ ID NO: 261 - DNA, 595 bp, Homo sapiens
  repeat_region (1)..(595): ltr49
tgaaggaaatcaaaatatttyaccccaaaatatayttctttgacatattttgagatggctrttcagagggcctgcaaacagaagtagccctgcaaagctgtcttttgtgggggagatttgcatctgtagagaaaatctgcattgatgcagccaggctttctctgaggccctcccttgtctggatctaggaaagattaactgagagtctgacacctttaaaggtctgaaagaaacatttaccatctattctctctgagggctgctacctgtgaggtttcatctacataacaagaccacctttgctagccaggcctcctcttctctccctcccataacctgtcttgccactataacctgatttaccaccataacctgttttgggccatgctccgagcccccattctttctgtaacctcaagatggtatataagcttctgtaccccattggggggagttttgggtattcactstgattctcccgtgtrtrcacgttaataaatttgtatgccttttctcctattaatctgccttttgtcagttgatttttcagcgaaccttcagagggcgaaggggaagttttcccttggcccctaca

SEQ ID NO: 262 - DNA, 969 bp, Homo sapiens
  repeat_region (1)..(969): ltr5
tgtggggaaaagcaacagaggtcagattgttactgtgtctgtatagaaagaagtagacataggagactccattttgttctgtactaagaaaaattattctgccttgagatgctgttaatctatgaccttacccccaaccccgtgctctctgaaacatgtgctgtgtcaaactcagggttaaatggattaagggcggtgcaagatgtgctttgttaaacagatgcttgaaggcagcatgctcattaagagtcatcaccactccctaatctcaagtacccagggacacaaaaactgcggaaggctgcaggggcctctgcctaggaaagccaggtattgtccaaggtttctccccatgtgagagtctgaaatatggcctcgtgggaagggaaagacctgaccgtcccccagcccgacacccataaagggtctgtgctgaggaggattagtataagaggaaagcatgcctcttgcagttgagacaagaggaaggcatctgtttcccacccatccttgggcaatggaatgtctcggtataaaacccgattgtacgttccacctactgagatagggagaaaccaccttagggctggaggtgggacatgcaggcagcaatactgctttgtaaagcattgagatgtttatgtgtatgcatatctaaaagcacagcatttaatcctttaccttgtctatgatgcaaagacctttgttcacgtgtttgtctgctcaccctctccccactattgtcttgtgaccctgacacatctccctctcagagaaacacccacgaatgatcaataaatactaaggggactcagaggctggtgggatcctccatatgctgaacgttggttccccgggcccccttatttctttctctatactttgtctctgtgtctttttcttttccaagtctctcattgcaccttacgagaaacacccacaggtgtggaggggcaacccaccccttca

SEQ ID NO: 263 - DNA, 795 bp, Homo sapiens
  repeat_region (1)..(795): ltr50
  misc_feature (342)..(342): n is a, c, g or t
tgtgccagttattaagctattgtctctcagctccaaacccacccttctatactctgctctgtgatgctggggctgggactcgactctgcaaaccacatttctgctttgccagctggctctccctgttaggctctgccaatagggggcgctagagggagactgcaaggggctggaggggaggaagaagggacttgctccttcctgtctgctgctgtttcctgtctgcttcctgttcctgtcagcatcaccccagcaatgcttcttcaccctggcagcagttgcttccagttgattccagcagcagcagttgattccagtttgcrsagttccagtttccaacantttytcccaacactcccagaaccagcctcattgtaccccctcctcctcctcagagacaccagcaccagctgggcagtgccccctcctcagaggtctgagtcccagctccatggggcccctcctctgagctcagagacaccagcaccagctaggcagtgccccctcctcagaggtctgagktcccagctccatggggcccctcctctaagcttctaagttttaataattccaacctcttcccttttgttcccccagccctagggggtggtggtagctgcttcctgcagttactacctctgtgataccttagtgttctctttttgccttttcagttctctaatamacaactttatacctagttaacctaagttaacaattctttatattaaattctctctgttaaaataactggtgtggtttctgtcttctcctgactggaccctgactgataca

SEQ ID NO: 264 - DNA, 671 bp, Homo sapiens
  repeat_region (1)..(671): ltr51
  misc_feature (25)..(25): n is a, c, g or t
  misc_feature (191)..(191): n is a, c, g or t
  misc_feature (193)..(193): n is a, c, g or t
  misc_feature (314)..(314): n is a, c, g or t
  misc_feature (378)..(378): n is a, c, g or t
tgtgatctgagagaccaaaatagangcccctttatcaactaagacgggccctaaggttaaggaaacaaaagttacctacgggtcaagggttcagggcctggctggcatggcaaatttctaaattcctacaagaaaaaccacactcttgctaaactccctaacacaataggagctatcaggcaaattatcananccctcctaactctgatttacaacccagaccactacaactctgattggacagaggactggccttacaaacattcttttctgataagaaactgcagaccataagccagttttggccagtttanagaggctgcacacaaactgtctttgtgtcctatagttcaccttttgacgtaaagagccaaattntacttcattttaatgctaaaactccaccccaaagtgaacatgggatgtatgttacatatatgtttacccattgcacatgtgctcggctcccctcataaatatttatagcttttcccccaaacctgctgaatatgtatgtctccattgtgtaataccaaccctgtgaggcataaaacccaacctgccctttccctctttgaagagagagcgcctttggtctatgccagagactatctcttcccagtttgcaaactgatattrccaataaagctctcctttctactatttagcca

SEQ ID NO: 265 - DNA, 421 bp, Homo sapiens
  repeat_region (1)..(421): ltr52
tgtaataaagagtctgactccattttttgatgtttgactgctgacagcttttaagcctcacccctccctcttccctttgccccacatctgggcaagctgataagaaagcccaggtgctccctcctttggtactagcaggaaattcaaaccatacaagcccctgcctgcgggaaccctcaccccagccccacccccctaaccacaataaaaaccccaagccagtctcctttccctgctctctcaagacatttttggacctgcttgggaggcctgccctgctctccccagaaagcctcaattatgtaagtaataaaccttttcataccctcttggtgtgtgtgtggcatcatcagtcttaacatccaaaccaaattttgggtgggggagtccatcctgcctctgcagagtgaccayaacaaca

SEQ ID NO: 266 - DNA, 519 bp, Homo sapiens
  repeat_region (1)..(519): ltr53
  misc_feature (184)..(184): n is a, c, g or t
  misc_feature (359)..(359): n is a, c, g or t
tgtggtgtaaggcctaaaattaaggcccaatattatgtgctgccttgacatctggtgaaatcaggagggcctcaaatggcctaactacaagttcccctccccactctgctcccatggataaggtcccctagccaaacaaccctccttatcaaggggaccaggcacagttcctgcttatccctgntgagtagygggtttcagttccctgccagcccgtggaattattcaaayaagccaatcacatcctcctgcgggaaccaggggtcacctcaccctcttgatactacaaagcctgcctcccacagcccctggttgttcactctgttcctgagtgcaacccccatgtggccctgtgtggnatgtggtgtcctcctcccccaggctgtgagtatatgtgattaataaactgctgtcaatctcatctgtccagtgttgggtgtcatgtgtttarccatccccataaccctagggtgggaatccctccctcaccaatggggtgaagaggaggcaatwaaaaca

SEQ ID NO: 267 - DNA, 510 bp, Homo sapiens
  repeat_region (1)..(510): ltr54
  misc_feature (266)..(266): n is a, c, g or t
  misc_feature (280)..(280): n is a, c, g or t
  misc_feature (288)..(288): n is a, c, g or t
tgttaaataaaatttataggaggccattgttttggactaagctcctgcactaggccccaacagaacagaccaaaccaaaatggagtcactcatgctaaagttccatgtcaccaagctgaaactaagttgtttatctgaccttccaagaaatcaggagagagagagagataacagccaaatccccaaacaggccagttttagccagcatgataaggaagtcccctctgctttaacctttaacctaatgttaagcaatcagttacttntctattgttctgtntccctgtnttaaccttacaaggaaagtaactttgaaatgaccaatctgctttttgttctctgtttctgctttcttcagcccttttctgtctataaagccaacctcctctgctcagctcatyggaacactcattctattttatagaatgaggtrttgcccaattctagaatcacaaataaaagccaattgagatctttaaactaaatttgttgtaattttgtcttttgaca

SEQ ID NO: 268 - DNA, 548 bp, Homo sapiens
  repeat_region (1)..(548): ltr55
tgttatataaatgagccaaagatggcctctgtgtattggcccctaggttgtttatttcttcactgcaggctgagacctgttagctcaaaagcccaccggcaccaaactcaaatttttacacatccawattgttttaaaaatagcccaaacaagcagatttttagccatttagagcctgcctgctttgcataccccgcgaaacytcacccaacatctgctagccattgcacttataagrccccaargcgctgctgcyctttggagctctctgacccagagactcccyaaccgtgctgctgagaaacatcacttagacacataagccccctctccgattcccctctcccccgggagttcccttgccctcctccccttctggatggtggtcccastccctaaacctctrgacagtctcwtgctgtgaggagcttccccttcatgcaaccctgtccaagtgccacccaataaagtttgttgtgtggtactgcccctgcgtggtcatatctttttccttgatcagcccccaaatcccttraacccccttcaca

SEQ ID NO: 269 - DNA, 445 bp, Homo sapiens
  repeat_region (1)..(445): ltr56
tgagaattaagaaaagaacttttatctgaggaatgcaagtcttttaaattatcaggcccagagagacattaaaatgagaccgcaatcacgtcctactccccactttgagctatgtatttcatctcttgaaactgcttgctattgccacaagtagctataaattaacctaataatgccacaccrgacactataacccacaccctatagcttaacaatgtatatggccaatcactaatcaatgttatttctgtaaaccaatgagaattyctgacaaacaactttgtatcagcccactccctgtccccctcttttttgcctttaaaaatccacttgtaactgctgctaattggagtgtatattcagggcaacttgaatctatgctcctgggttgcaatcctcaagctttggctcaaataaactctctacttatattaattttgcctca

SEQ ID NO: 270 - DNA, 411 bp, Homo sapiens
  repeat_region (1)..(411): ltr57
tgtagtgtgacaggtcccccaaccaggttacttaagggtgtatgtccgctgcctgaaccctgaaggccaggtggtgagccaaggccatggtgcccagctgaggagcaggtgtccctgagaacccaaacatcccrgagagtatctgagaacctaccaaggaaaacagtcccattacacacacacagtaggcaaagagccagaaaattagcttaaaagcagcttagagatgggaggtggcacggatctctagagctgtcctgctgccatccaggagtgccctgtatgtaagtcctaataaactcatctacttatcaagctggacttgtccgagtcattctttggtctctcrgctccttcccagtttggggggaggtatttttttatatacagtcccaggtttttcttgtaaca

SEQ ID NO: 271 - DNA, 679 bp, Homo sapiens
  repeat_region (1)..(679): ltr58
  misc_feature (150)..(150): n is a, c, g or t
  misc_feature (225)..(225): n is a, c, g or t
  misc_feature (386)..(386): n is a, c, g or t
tgagacagtatagggaagagactcagtcctggcagacaagagacatggtaaccaagatcccaatgggcctcacatgtccaggcatattccctcccctaccttcttgcctcccttaacaagctgacccaagtcacgtagcagaaagggggncctctcctaacttagctgaccaggctgaattcctaaccataaaaggaagaacctaaccatttatctccttgagtnatgtcttccaaggttgctgaagcaggactctggcattcctgataagaacctgaccagatgcagccggctgaagacaagatggactccagcgctgacctttcaccaagtttttcttcattataatctcattgtaatactaaaatctccgcccarggtgggrnttatctgccahtttctrgacatgcgatgcatgttagagcatgacgtctcactgcgcaggcgctaaaaagaccccgcctaaacatgcttgcctacacgtcgctcctttttcctgcctcaacttccttaaaatgacaagagccgagcccttttgggagctagcatcaggatccctttcctgtacgctgctcccttgcgctgctcgagccgcaagcctattaaaccttgcctgagaaaatcggtttggcctggtgttaatttctacttacatgagagccaaggaacttggggtcca

SEQ ID NO: 272 - DNA, 597 bp, Homo sapiens
  repeat_region (1)..(597): ltr59
  misc_feature (308)..(308): n is a, c, g or t
  misc_feature (312)..(312): n is a, c, g or t
  misc_feature (553)..(553): n is a, c, g or t
tgagaaataaaaataaaattctaagcccccaactgactgaacagaccccctcttggccgagggaaccccagagaaaccttggaagctgarttcacggccataacaggatgggagatcagacacgcctcattataycccctccctcgctaactaccattaggttttcttccctaagggctaaacagaaaccagccctttcaaaagtctccacactgataatgtccattactagcttatcttcccaggtacagaacaaagacaagatgagattaatcattccttcacccctccccgagacatctgcttantttnttcctctattcccttttycttcaaatgttcaccttatcttatgtaaaatgtagatttactgggcactaactaaagtctcacaagtatgtaatcattcgtctcactgccacccccttttttaaggaaaatgtgtaaatactaaacctcctgagaacctctttggaaaaaacagccacagatgcttctgtgacttacatttttcctrgrtgtgccctcaagctggctcagtaaacctcgatgntttgagacttatacctcaatcactcattttggttatcacyctca

SEQ ID NO: 273 - DNA, 586 bp, Homo sapiens
  repeat_region (1)..(586): ltr60
  misc_feature (37)..(37): n is a, c, g or t
  misc_feature (96)..(96): n is a, c, g or t
  misc_feature (121)..(121): n is a, c, g or t
tgttagagtaggcagatagccagacatgagcaggagnggaagcccctgrgaaaaggaaggtctggaaaatctcacacccsagagaccacccaaaanatacataytagatatgagcagagangaggggaaatacctatgcagaaaaaaatgccccttaagatgcccagtaatcattcactctgcagttaaactgtcagaatgttgctagctacatgctgataagggaagagggcaaaggagaaattcctaagagataygcaggtgcagtaagtacagatttgaccactatacaaccttcctggggtggcagtaatgagcaatgcmgccattaggtagrattcatatccaacaccgggtccgtgcatgcgcatcaaccaacagtaagggaggvtcccacaagcctgggtaggaactaggtggggaaargcagggacttaaggcagaagcaggaaaactagasaaagaaaaaggtggagacttaagacagaggtgggaacttcaaraaaaatcygacatcataaaaaccccgtgcagactctcagggctgctgctggctcactctctttcagcagcccrctctgcctca

SEQ ID NO: 274 - DNA, 595 bp, Homo sapiens
  repeat_region (1)..(595): ltr61
  misc_feature (283)..(283): n is a, c, g or t
tgaggcagaaatttaaaaataataataagtactgcattcattcactccaagaaaagtaaaagccaaggcccagaatgtggcaaggcaagggttaaaaagaaaaaaaaaargaacaagttttcctctgcctagccaagctcacttcaaggacagttataagataacgctgtycgaraagccaaggccaaaggaatgggctccagacacccccccacctccagagcaaggttgaaggaaaaaaagagaaagacaaattcctttactgttactcctttccctggcntcttaagcatgactatgttttacaaatgtctgtatttagccagttcttgtttttctttygacgcagctacaaggccaccagctatgcaaggccacaagttatgttatgctatagattatgtgacctgtcactgtatgattaactgcctttgttttgcttttgtaagcctgcttataaaaaccccrctctgtctttgttcaaggctcagctttttggatgtgaatccactgagctggtgcgtaccttaaaataaataacaatcctcctgtattcacccatattggtctctctagtcctcagtttcccrcaaca

SEQ ID NO: 275 - DNA, 719 bp, Homo sapiens
  repeat_region (1)..(719): ltr62
  misc_feature (318)..(318): n is a, c, g or t
  misc_feature (674)..(674): n is a, c, g or t
tgtatagagcacccttgacataagtaactccatcttagaaaaagactccatcttacatttcaaaaggcatcttgccaacagggaccagatgttttgcctaatcaataaagactgcayccaaccagataaggacataaacaagcacactcttccactatcagtcctcaccagaggactctgtggccataaaaagagcaggacttcaccagctcaaaatggccatcttaacagacaccgtcttgctgtcacttgtgataagcacccagcatctgccaccaaaggctctgcccacatcaaagactcttccttgcaagacantgaggctgacggactgcctggatcaggccaggacactctttttgtctacgtcactctccctggactggttcgttaaccctttttcctatcccttttctcttgatgttaaatgttactttgtttgttgtggaatgtttaatctataacatttatatattgattaagtatactattatgtatggtttgcaatattgactgacttgtggagtggcttgagcctgtgtgcccatggctctgactaccgagtgaaygggaagtactaaggagaattgcctccttgggaactccatgtagctcgtggcttttgtgattgaaatagcatcaataaaagtctgacattgtggaaagacacaaanatgtgtggacctggttatctctgaccttgcrctgctcacgacaca

SEQ ID NO: 276 - DNA, 557 bp, Homo sapiens
  repeat_region (1)..(557): ltr64
  misc_feature (339)..(339): n is a, c, g or t
  misc_feature (344)..(344): n is a, c, g or t
  misc_feature (100)..(100): n is a, c, g or t
  misc_feature (468)..(468): n is a, c, g or t
  misc_feature (542)..(542): n is a, c, g or t
gtgagacaaagtaacaaatgtaagaagccatgtctgctcatttctgcttgccaacataatttcacaaagcccctgactctgtgatgacatgcagctctcnagaaagatgctttgaagacaaarcaggatrgagcacacagccccccayrtctcttgcctgagtcactayattccttaaaagataaatgaccctagtccttgccttttcctacacagaagataatgtctgacagggttagtgattatgcctctgtaatctataaccagatgtactcttacacccaaactttgatgtgattctgctctaatgtaacttctgagcaagtttgatgtgattanttctngcaagtttgatgtgattttgcacgtactgaacctctaccacctgtatataagctgtgggctgaaacactgttttggagcagtctgacagaacctctctgaaagactgctcccaggctataggcntycctcagtctacagtcctcagtaagacttctgaataaaactaactttaattctttaaaagcttgatttttttntttctttagttaaca

SEQ ID NO: 277 - DNA, 669 bp, Homo sapiens
  repeat_region (1)..(669): ltr65
  misc_feature (131)..(131): n is a, c, g or t
  misc_feature (465)..(467): n is a, c, g or t
tgagaaagtaaaaatctgccctgccattcatcaggctgggataacagacacagataaagccagctgcaaagtataacaggaaacaatatttctcccaaggacatactgcagctgtaaagtgtcataacaancctccttctttgagtgactactgctttcttactcactgagaaaccttgttctctaaaatcatagactatcagaaactttgctgtttgaaattatatcagtaagaatgaaacatcccactcttgcctggaggatctaagtcactttgacacagagaagcagcctcaatttccaacccaggtgcagagcttcagataaggggtttctggacacaacattccacatttatcttaactttgtagtttccaaggaaacaggaccctgggtccactttgcagtccaggacctgatgttgacccctttacacacagccctgctttgctttgagcctatcannntcaaaacactgcttcatttaaatttcacctaaactccacccttcccccaaatcctataataactctatcttttcctttgtttggtgagatgctccatggttcctctggtgtgcagtctccctcattgcaataagtcaataaacctgactttgttggactacaggtttgtccctggtggtcttaggctgattgggctaggaca

SEQ ID NO: 278 - DNA, 610 bp, Homo sapiens
  repeat_region (1)..(610): ltr66
tgttctgtgcgggaaacgcgtgaggggagaagaaaagacacacacacaatacctttaagggtaaacaagctttatcccacgtaaatggcaatgcagatataataagcaaatgatataataagcaaattgatataataagcaaattgcaatgggaaggggagaagggaaaagatatatatatatgtatatatatatatatatatatatttacactcaccagactatggaggattcaccaccagactgggaagcaacagcctgggctccagagtcggccactcatccgtgcacagacgaggagaggtctcatgaagcttyggygcagtctgggaccctagctctttttgtaacgagttgtttggcatgaggcccagtcacgagggcccttcacgactgggctcaaggaacacaaaaaggtcaacttgtttttgtgattgtctattgtttttcaataactaatgtataggaatagattgaaatagagatttctccgaaacagcgctggatgaatgcctcaaggggctcacacaacctgttccaggacttggtgaccattgtttgtgtccatgttcaattgagttcaaatttaatatttaacttttcctccaca

SEQ ID NO: 279 - DNA, 566 bp, Homo sapiens
  repeat_region (1)..(566): ltr67
  misc_feature (16)..(16): n is a, c, g or t
  misc_feature (98)..(98): n is a, c, g or t
  misc_feature (235)..(236): n is a, c, g or t
  misc_feature (402)..(402): n is a, c, g or t
tgtcattyttttggcnactcagcatttgaacacccttcctatgtttggggaatttcccaccttataaattctacctctttaaggtagaagccagaaanctcattttcccagcctcccttgcagctagggtgcwggcatgtgacctaggctccgccaatcagatgcacccatgcagcaagacttcaaattagaagctagtgatgcaaagaagcaggtgccatgcagaatccactcnngggtgagagtggcagcagctggcagagagttttcagaggcaggagtggcagagatccaagtagtagtgtccagtgttcatgtgtggtgcaagtggtggtatgcagtgtccagtagtagcagcagtggtatcctcactgtgaccagttctgcagtgtgatttgggcngcattgttcctggctgtatagcctctaagcctggttctctagccctcctagagattctgtgagctacctaatatcctttaatattcctttaataaattccttttctgcttaaattagccagagttggtttctgttgtttgcaactaagaaccctgactgataca

SEQ ID NO: 280 - DNA, 563 bp, Homo sapiens
  repeat_region (1)..(563): ltr6a
tgtgataccttaccttgttttaatatgacacagactctcccttagctgagaaagccagacagactccatttggctccttcatttgcaagacatcaagggctccttacccacccccttcctcaaggactcgtgcaagctgactcccagcacatcaaggtagtgcaattaaccaataaggtactgtggcaagttatgtccacagttcccagaaattcgcccaagtgatagtaccctaagcccccgcgtttgtgtctggtagatagcagccaaagccctcgcacctatcaccttgtgatgtgatggatttaaagcccctgcacctggaactgtttgttttcctgtaaccatttgtctttttaactttttttgcctgttttacttctgtaagattgctacagctaggcttcccctcccctctctaaaccaaagtataaaagaaaatctagccccttcggggccgagagaattttgagggctagccatctctcggtcgacagctaataaaggactcctgaattaatctcaaagtgtagcgtttctccataactcgcttggttacaaca

SEQ ID NO: 281 - DNA, 450 bp, Homo sapiens
  repeat_region (1)..(450): ltr7
tgtcaggcctctgagcccaagctaagccatcacatcccctgtgactagcacatatacgctcagatggcctgaagtaactgaagaatcacaaagaagtgaaaatgccctgccccaccttaactgatgacattccaccacaaaagaagtgaaaatggccggtccttgccttaagtgatgacattaccttgtaagagtccttttcctggctcatcctagctcaaaaatctcccctactgagcaccctgcgacccccactcctacccgccaaagaacaacccccctttgactgtaattgtcctttacctacccaaatcctataaaacagccccacccctatctccctttgctgactctcttttcggactcagcccgcctgcacccaggtgattaaaagctttattgctcacacaaagcctgtttggtggtctcttcacacggacgcgcatgaaa

SEQ ID NO: 282 - DNA, 691 bp, Homo sapiens
  repeat_region (1)..(691): ltr8
  misc_feature (502)..(502): n is a, c, g or t
tgaaaccgcctttgcaaaattatgactgagacagtgaaagagatctaacttwactgactccatcttgcttctaacctccaagctgtccttgttcattcctgggcgtaggctgaactaactttgggagaaacttagtttatagtttatagtttaaacaaagacggtaacagccctttcccaaagcagacctccttcttgcctggggactagattgcctttgtaggactaacattagccgcaagattagaaattatggtttaggagtcatgcagctggaggctacaagattctgaccctccctaaactgctcctaagatcagtgcttgagatattttgcagaccctgcgcttgatggatcagctggcaccacccagatcaataaactggctcatctgatcttgtggcccccacccaggaactgactcagcgcaagaagacagctycaactycctatgatttcatcyctgaccaatcagcactcctggctcactggcttcccccnacccaccaagttatccttaaaaactctgmtccctgaatgctcagggagactgatttgagtaataataaaactccggtctcccgcacagccggctctgcgtgaattactctttctctattgcaattcccctgtcttgatgaatcggctctgtctaggcagcgggcaaggtgaacccmttgggtggttaca

SEQ ID NO: 283 - DNA, 727 bp, Homo sapiens
  repeat_region (1)..(727): ltr8a
tgaaactgcctttgcaaaaattataacagtgagaaaattatgacagtgaaagagatctgatctaaccaacccccatcttgcctttaacctccaaactgcccttaatyattcctgggcttgggccaagctaactttgggagacatttagtttatagtttaaatgataatagcccttccccaaaactmaaccgcctttgtaaagctaatgaaagaccaccaggytaggaggatgagaggagcctgaattctgctaaggtgtagacataaacgattaccagccattattccagaggtcacaagatttgcaacttccccaattactcctgcagataacatcactattgtagaacctaagattggccttttgagatatcttttcaggtttttttgcatttctgacaccaatggctccacctggacccgccaaccactcctgtggccccacccagaagtgactcagcacgcacgaggaccattttccacacccctatgattgcatccccaaccaatcagcagcaagcacccattgcctagccacccccaccccctgccyaccaaactatctttgaaaaaccctagcctctaaattttcagggagattgatttgagtaataattctgtctcccacatggcgtggccagccttacgtcaattaaactctttctttattgcaatgccatggtctttgtctgtgcagcgggcaggaagaacccatcgggcggttaca

SEQ ID NO: 284 - DNA, 645 bp, Homo sapiens
  repeat_region (1)..(645): ltr9
  misc_feature (230)..(230): n is a, c, g or t
  misc_feature (235)..(235): n is a, c, g or t
  misc_feature (396)..(396): n is a, c, g or t
  misc_feature (399)..(399): n is a, c, g or t
  misc_feature (449)..(449): n is a, c, g or t
  misc_feature (469)..(469): n is a, c, g or t
  misc_feature (484)..(484): n is a, c, g or t
  misc_feature (497)..(498): n is a, c, g or t
  misc_feature (636)..(636): n is a, c, g or t
tgatacaggagttaaaaagaaattatttaggcagatagtgagggtaagggagtcctcggtaaggttttccttttaacgaaaagcagcccccaaatcattttcttttctaacaaagagcagcctgtaaaatcgagctgcagacatagayaagcaagctggaagcttgcacgggtgaatgccggcagctgtgccaataggaaarggctacctgggggcyaggcatgttcaanatggnggctccatcttcccttctctttgtcagccacgtgtacagtaaggagcagacaacatggcgccggccargtagagagcccatttgcataataaaagattagggtggggcggccagccttccccgcgcgctatgyaaacgkcacacctggtccaaccaatctntgngccctatgtaaatcagacaccgcctcctcaagcycgtctataaaatccgntgcatytgccaccagccggncttttccactcgggnacccctctctctnnagagagagagagctgttctcctttctcttttcttttgcctattaaacctccgctcctaaactcactccttgtgtgtccgcgtccttratttycttggcgtgagacgacgaacctcgggtatttaccccagacaacgangccgcttca

SEQ ID NO: 285 - DNA, 644 bp, Homo sapiens
  repeat_region (1)..(644): ltr9b
  misc_feature (78)..(78): n is a, c, g or t
  misc_feature (144)..(144): n is a, c, g or t
  misc_feature (430)..(430): n is a, c, g or t
  misc_feature (443)..(443): n is a, c, g or t
tgttgtaggagttattaagaaattattttaggcagatagagaggaaaaggggtccttgggaagttttcgtttcttttnaaagcagctccagaaacatttcttgtctagcagaaaagccccggctcttagagccaggccggcaanctttgatatgcaaatgcaggccattagaaactgggtccacccaacatggcgattcccaccgtcgtcttcttgcccttgccccacatgtgcctggcaacatggccgcccccacatatccccacgtgtgtagaacatcatggcgccctgcatttgcatattaaaaggctagggtgggagggccagttttttcgcgggctacgtgaatgacatgcctggtcaaaccaatcccctgagccctatgcaaatcagacaccgcctcctccagcctcctcatataactggctgntwtccgccgcacncggggtttcctctctcggctttggagcccccctccctctgtctctgtacaggggagcttcttccttctttcttctcccttctttcttgcctattaaactctccgctccttaaaaccactccacgtgtgtccgtgtcgttttatctaaatcggcgcgaggaccaaggaccctggtgttcctccastcatcggagccgtatca

SEQ ID NO: 286 - DNA, 80 bp, Homo sapiens
  repeat_region (1)..(80): madel
ttaggttggtgcaaaagtaattgcggtttttgccattactttyaatggcaaaaaccgcaattacttttgcaccaacctaa

SEQ ID NO: 287 - DNA, 471 bp, Homo sapiens
  repeat_region (1)..(471): marna
  misc_feature (22)..(22): n is a, c, g or t
  misc_feature (25)..(25): n is a, c, g or t
  misc_feature (70)..(70): n is a, c, g or t
  misc_feature (302)..(302): n is a, c, g or t
ttatacatccaaatgaatgttntcnttcaaagtagtcaccttgggaaagctatacatttatttttaaccnawcacaattctgccattgatcaaaacatttttggaacttctcttttggaattgccttcagaaccagtttatgagccacataagaaaatcagtctcattactttatagtcacacctcatttttgaccaaaaatagtattacccagtttgatcacccaccttattcaccagacttggctctgaatgacttttggctgtttccaaaaatcaaatccaccctcaaaggataaaganaagatttgccaccattgaggatattcaaaagaatatgctgcaggctctgaaggcaattccaaaaagaatgttccaaaaatgttttgagcaatggcagcatcattggaataagtgcatagcttcccaaggtaattattttgaaggggacaactctcatttggatgtataa

SEQ ID NO: 288 - DNA, 1264 bp, Homo sapiens
  repeat_region (1)..(1264): mer100
  misc_feature (137)..(137): n is a, c, g or t
  misc_feature (289)..(289): n is a, c, g or t
  misc_feature (495)..(495): n is a, c, g or t
  misc_feature (546)..(546): n is a, c, g or t
  misc_feature (1165)..(1165): n is a, c, g or t
  misc_feature (1190)..(1190): n is a, c, g or t
  misc_feature (1241)..(1241): n is a, c, g or t
  misc_feature (1238)..(1238): n is a, c, g or t
gattccagggtaakcttacaagacataaattcattcactgcatcattcataggcaagctaytrcaacaaagatgttgaarccagaggtacamaaaaggctgcatgacgttactaatgttaatgttataaaaacaaanctttaatatcttgtacagtagaatctatataatactttgtaataaawtgggaartgaccatgaaaatcttttgtaccacacagaagtttgctagttatcttgtggcaaagtacttaattaagagttgtcaaacttaaagatgagttatattnatttttctttttacaaaaagacaagtgttccaaatttgactgaccttttctgtgatgacaagtgactgtcagtagtatgctacctagtagatatttttgaaaaaaataaacgcacttaatctgtcccttcaaggtaaaggtgtcgatattttaacaatgagtgagaaagtaactgcttttgaargaaatgcacaatatggagagancattttgaaaatagatgtttggaaatgtttccattgttatatgattttgtngccgaaaatgatgtaagtgtgatacctataaaaactctcatatctgcacactttaaaacttggaaacagaaatttctaacctgctttttaaaaatcttccaaatgaagagttttaagtgggttttgaacacatttgttaaaaatattaaaatgcaacatcttccgattagtttgcaagaacaactgattgacatcagggaaaatggaaatttactagccaaatttcaacaaaaacctttgcataattggtagatgggattgaaaaatgagtatcatgatttagtaagcacagccaatgatatayttcttccatttggatctacatatctttgtgaggtatctttttcagctatgacagccattaaaaccaagtattgaaataaagtaaaaaccagaccttcaaatcactgtatcaaagtgttaaaccaagatttcatattatyctagcatttaaataatgtyagatttttaaaaaaaagcatattcaatcatattctctcattaaaaaatwaataataaaattttaatgaatatataaaargttttatatacaattataaaatwtaaattattttaaawtatatttyatctttatctcatccttttaaaatttsttttntgtatatgctttataatatgcatantaagagtagtacatgcatataatttawaaattaaaatacayatgttknaantayatgttcaaaatatttttatt

SEQ ID NO: 289 - DNA, 474 bp, Homo sapiens
  repeat_region (1)..(474): mer101
tgtgaacaaatgtgaacctgaaagagccaatccttcaagatggatcccgagtggctaactgggcctaaatttaaaatagagccaagcggccatttgctgactagaggtcacacacgtactctgagttccccgaaaacccacacctctgtttaactttgggactttcagagctcacctgaaccaaccaatcagagctcacctgcmtcaaccaatcagggctcagctgtatcaaccaatcagaactcagctgtgtcaaccaatcagaactaagcaagtttgaatccttcatttgcataaacggacctgattgggaacctgggcaggaacttttgctataaaacccaaaccctccctttgttctctggaaccgcaccttcgttttacaccgaaggctgcatctccccggtttgcaaactgttcactggaataaagtctctttcctccaaattccttttcagagaacttttgttcaca

SEQ ID NO: 290 - DNA, 570 bp, Homo sapiens
  repeat_region (1)..(570): mer101b
  misc_feature (142)..(142): n is a, c, g or t
  misc_feature (209)..(209): n is a, c, g or t
  misc_feature (353)..(354): n is a, c, g or t
  misc_feature (449)..(449): n is a, c, g or t
  misc_feature (552)..(552): n is a, c, g or t
tgttaaagtatgcccctagctgacagacaaaatggactccctgtggctaamtgaggtgctcaaagttaaaacagaaccaggcagccatggctgggtgagggagcagtcacatattctgtgttctcagaaagatgtaaaagtntcacaggacctccctttctacaatcaagccaaaccagttcctattgtyagtgccaagataaactgcngccagaaaccacctccccacaagcccactagaaacaaacatctgacagagacttctgatttggggcttggaaaccaaccaatcagagctcacctaccccagccaatcagggctcagctgtatcgaycaatcagaactyagctgnnccaaccaatcagaactaagcaagtttcaatccttcatttgcataaatgracctgattgggaacctgggcaggaagttttgctataaaacccaaancttcctttgttctccggaaagcaccttcattttacactraaggctgtgtctccctggtttgcaaactgttcactggaataaactctcctccaaattccttttnagagaacttttgttcaca

SEQ ID NO: 291 - DNA, 332 bp, Homo sapiens
  repeat_region (1)..(332): mer102
gggttgcaaactcaaatgcctacaggggccaggcaggtaacataaatgagtgaagtgggccaggtggggactgtggcaaactggagagcacatgccctgtctaaagggggcagcagctgctactcagctccagccaattgttgccatgtgggaatgtaggcccagtgttgccagatcttctgatttttcaagagaagccagaaatctagatttttatgtgaaatctcctgatttttaaatgttggcaactaatttaaaatttttawaaaacactgtgtaggccaaacaaaacatatctgtgggccagatttagcccatrggctgccagtttg

SEQ ID NO: 292 - DNA, 166 bp, Homo sapiens
  repeat_region (1)..(166): mer103
agttccatggtcaaataagtttgggaaatgctgggttaaacaaagttaaacaggtttctttactgcaggacttctcagagcctttaatatgctaatgtgcattgtgaatctccaagaggggaaatatagtatgcagtrtttcccaaatttatttgaccatggaact

SEQ ID NO: 293 - DNA, 185 bp, Homo sapiens
  repeat_region (1)..(185): mer104
taccatatttcattgaatctaagatgccatcaattgtaagatgcaccattattttatgtaccactaagaaagaaaaaaatgctgccaattaaactataacatgccattaattgtaagatgcatcccaatttcagagatgttaaaatgtgaaaaaatgtgcatcttagaatcgatgaaatatggta

SEQ ID NO: 294 - DNA, 204 bp, Homo sapiens
  repeat_region (1)..(204): mer105
cagcctttctcaactagggttctatgagagaattaagccctaatgccctaaggcatccattgtatgtaatgaattaacttctctcctatgcatcctagaatggtactagttatataccatccttgggagaattgagaaaatagtcactcaaatcattttctgtgttctgtggttcagatgaggaaccctggttgagaaaggctg

SEQ ID NO: 295 - DNA, 258 bp, Homo sapiens
  repeat_region (1)..(258): mer106
cctatttacattaggccatgcattctcaacaggggcaatattgcccccaagggggtgaaaattggttcttggggggagaaaaaatcttagatattacaatggtttgtggccctccaaagggccacagtacataaacagatatacagtatatctgtggtattaaaatttcatggggaagggggtattaggaaaaaaatgtctaaaaaggctccttagggggggaataatgaaaaaaggttgagaaacactggtctagag

SEQ ID NO: 296 - DNA, 197 bp, Homo sapiens
  repeat_region (1)..(197): mer107
caggggtgtccaagggagagaatacagtcatgggttcttagtttctgtttctggttgggccagtaaagccccttcctcatccctcttttctacttatcactagagacagaaactaaaaaccatggcttcaggctgctaaaagcctaaaacaaaacaaaacagaacaacaacaaaataaggcgggttggacaagcttg

SEQ ID NO: 297 - DNA, 633 bp, Homo sapiens
  repeat_region (1)..(633): mer108
  misc_feature (2)..(2): n is a, c, g or t
  misc_feature (10)..(10): n is a, c, g or t
  misc_feature (17)..(18): n is a, c, g or t
  misc_feature (20)..(20): n is a, c, g or t
  misc_feature (57)..(57): n is a, c, g or t
  misc_feature (90)..(90): n is a, c, g or t
  misc_feature (113)..(113): n is a, c, g or t
  misc_feature (135)..(135): n is a, c, g or t
  misc_feature (182)..(182): n is a, c, g or t
  misc_feature (184)..(184): n is a, c, g or t
  misc_feature (225)..(225): n is a, c, g or t
  misc_feature (302)..(302): n is a, c, g or t
antacacctngcagttnnmncacagtttcactgtaaattttaaacacaaataaaaantccaartggtcacatagaatgatagaattgaantaactcaagttctgttgtctttntttttacaatcactatgctatngtttaaatacaggaatatgtagtaccacaggggttggagacatgaantnactgtacccgaagtgagcttgaatgrattctaaactattangaacttactctagaaacaaacatatgtagctgagtccacgtgtgttgggggccaactgtataactggaagttctctnaattaacttccatgtagaatacaatgtttattaaaggataagtaataaaaatgtgctaatttgaagtttacatatatattattaaaactcaacagtaactgcagcaattkgtttagaacttagaccaacaaaagattttttttttwgggaggagtattttatcactgacattgtttagaattgctggtgcatggtgataataamaaagcagactgacttttagtcagttttattattgttaattctctacagacaatgcacccccttattgcctgcacctggggcggaccactcccactgccctgcccttggtatgccactggtttcctac

SEQ ID NO: 298 - DNA, 1994 bp, Homo sapiens
  repeat_region (1)..(1994): mer109
  misc_feature (12)..(12): n is a, c, g or t
  misc_feature (18)..(18): n is a, c, g or t
  misc_feature (31)..(32): n is a, c, g or t
  misc_feature (54)..(54): n is a, c, g or t
  misc_feature (68)..(68): n is a, c, g or t
  misc_feature (90)..(90): n is a, c, g or t
  misc_feature (167)..(167): n is a, c, g or t
  misc_feature (184)..(184): n is a, c, g or t
  misc_feature (249)..(249): n is a, c, g or t
  misc_feature (254)..(254): n is a, c, g or t
  misc_feature (262)..(262): n is a, c, g or t
  misc_feature (300)..(300): n is a, c, g or t
  misc_feature (303)..(303): n is a, c, g or t
  misc_feature (385)..(385): n is a, c, g or t
  misc_feature (413)..(413): n is a, c, g or t
  misc_feature (451)..(451): n is a, c, g or t
  misc_feature (471)..(471): n is a, c, g or t
  misc_feature (493)..(493): n is a, c, g or t
  misc_feature (524)..(524): n is a, c, g or t
  misc_feature (533)..(533): n is a, c, g or t
  misc_feature (576)..(576): n is a, c, g or t
  misc_feature (593)..(594): n is a, c, g or t
  misc_feature (602)..(602): n is a, c, g or t
  misc_feature (611)..(611): n is a, c, g or t
  misc_feature (648)..(648): n is a, c, g or t
  misc_feature (656)..(656): n is a, c, g or t
  misc_feature (686)..(686): n is a, c, g or t
  misc_feature (690)..(690): n is a, c, g or t
  misc_feature (852)..(852): n is a, c, g or t
  misc_feature (858)..(858): n is a, c, g or t
  misc_feature (865)..(865): n is a, c, g or t
  misc_feature (872)..(872): n is a, c, g or t
  misc_feature (1066)..(1066): n is a, c, g or t
  misc_feature (1069)..(1069): n is a, c, g or t
  misc_feature (1079)..(1079): n is a, c, g or t
  misc_feature (1231)..(1231): n is a, c, g or t
  misc_feature (1240)..(1240): n is a, c, g or t
  misc_feature (1393)..(1393): n is a, c, g or t
  misc_feature (1468)..(1468): n is a, c, g or t
  misc_feature (1516)..(1516): n is a, c, g or t
  misc_feature (1549)..(1549): n is a, c, g or t
  misc_feature (1562)..(1562): n is a, c, g or t
  misc_feature (1587)..(1587): n is a, c, g or t
  misc_feature (1587)..(1588): n is a, c, g or t
  misc_feature (1632)..(1632): n is a, c, g or t
  misc_feature (1657)..(1657): n is a, c, g or t
  misc_feature (1689)..(1689): n is a, c, g or t
  misc_feature (1832)..(1832): n is a, c, g or t
  misc_feature (1906)..(1906): n is a, c, g or t
  misc_feature (1914)..(1914): n is a, c, g or t
  misc_feature (1966)..(9166): n is a, c, g or t
  misc_feature (1763)..(1763): n is a, c, g or t
aaagactagatntttcanatyagaacttaannttgtccactatatacacagcantgttaaataaaatngcacacacataacaatggttanaatctgaaatatcttctaaatatgaacattttggcctagaacctttcttttctcacttccttctctctgccttcaantcagtggacaagtatangcatgtgtaatgctctagagatggtttaacaaatttatatccaaaagtcatttccagaagacaanccttnctatraantttaacaaaaagtktacaaaaggtgctaattctactangtnctttgtcatacactggcagcctctttaacatctagagactagatgttgcaaaattaggactcatttgtccattatatacacnatatacaaagcaaaacaaaatgcacaanacatacagaacaagagttcctgaaaatgtgcaattatnaacacactggcacadaaccnttcgcacttccttctctcccanctcctctaaaccactgaataagcacagacantaatatacngctcaaagagatggtttaacaattccattyccmaaagacagtntttcctrtgaattttanntaaaagtnacttaaagngtgttattttactacctctacatttaacatacattangcacttcnraacatctagaaagactagatrtttcaaanaagnacttaatttgtccactatatgtacagtagcattgaataaattgcacacatataacaatggttataatttgaaagtgtcttctaaatatgamcattctggcctaaaacccttcccatctccatcaacycagtggacaataatgctcaagttttcagaagacantctttnctatganttttaangcaaaatgtacaaaattattagtttactaactctacttttgtcatacactggcaacctctttaacatctagaaagactagatgttgtaaaattaggacttgtttgtcctttatatacactatatacacagataagtaaaataaaatgcacagacataagagacaatggttaatcttgcctcactgtaaacacantgntggcataganctctttgcacttccttctcctgcctcctcccctgaaccagtgcacaaacacaatgtgtaytactcaagaggtggtttggccattcccccaaagacaacatttcatatgaattttaacaaaaagatatttacaaaatgtattattttactacntctactttnaacatatatcaggcacttcagaacatctagaaagactagatatttcaaaaaaatacttagcattgtcaacgatatatacagtagtgaggaataaaatgcacacaaaacaatggttataatatgaaaatgtcttctaartatgaccagtctggnaaagaaccttcttctcttcattctcacgccttctgctccatgkcctctaacccactgaatgaacgtggtsgtgtntgttgctcctggtgtcacttctagagctcgtctaacaatttcgtttcnaaaagtcatttccagaagacatttrttttctankattttttaaaanaaaaaagggcatttacaagacgtgnnattttctaacttyttwacatatagaagggctagatatagcaaanattttctwttaaaargttggggggnaagttgagagcagctttttcatattatatacncgggccttctataaacggtggccagtaaatcttcccaaagggtggtgggcatytccaatgcgccaaatgtggcntgttattcyaccatttctctcttccmacatcaaggtctggtagaasgaaggccaaccgcccgatggccngctaaccdttctacccgtcstygtccgggactcygctcaccttctaggccgtttaaggcctttgtccrtcattnctggcatngtcaggactaggtamggtctcgdccaactgggacagagcggtcagcccgggncccgsrtytgygcrrctccrwggcmtaa

SEQ ID NO: 299 - DNA, 500 bp, Homo sapiens
  repeat_region (1)..(500): mer110
  misc_feature (352)..(352): n is a, c, g or t
  misc_feature (468)..(468): n is a, c, g or t
tgaaaactgaaaccaacataatttcctgtccctgdgttaaacaatactgggaccaggcatacttttctgttcctatgttaaacaatactgagaccaagcaaaaataacttagctacttgctccaggaaatacytgctcctggaagataagactgtgaaccaactaaaatagcttacttatcaagactaacagcttactcatcaaaactcgtttcaagaccctcgcctcactgtgcccaccaatccaaagctattatgtcataaactctgcccaatcccaaccagttccccgccttgcaagacccaccttaaaatcacccagcccaggccctaaaaccctataaataatcctnccctaatttttccattttgagacactactaagactctgtatctatgtcaaggtgatgttcttccttactgcagtaagtctaataaaaactcagctttgcttgatcaacaggttttnttttctggtggtctttttggggagycgacagt

SEQ ID NO: 300 - DNA, 468 bp, Homo sapiens
  repeat_region (1)..(468): mer110a
tgagaactgaaaccatctaccacccacacagcttactgactgtctacattaacatgactttactattccactgtcttcatcaacataactttactattccaggaaactcttgcccaggaagataaaagttgcaaataactttattgttcatttcaggaacttcctaaaaaacccatcaactcttcaatagaaagcatcaaacgacagtttatccccaagactctttgaaacccttgcctcaaaaccctcaccttgctgtgtctgtgtccaccaatcctaaactattatatcatgatccttacccaatcctaatcaagcccctacattgaaagacctgccttaaatcagactccaaaatctcaataaatatcctgactttgccctccctcctctgagacactactaagactctgtaaggtggtgctcycccttaccacagtaagcaataaactcagctttgtcttatca

SEQ ID NO: 301 - DNA, 270 bp, Homo sapiens
  repeat_region (1)..(270): mer111
  misc_feature (63)..(63): n is a, c, g or t
  misc_feature (68)..(68): n is a, c, g or t
  misc_feature (92)..(92): n is a, c, g or t
  misc_feature (100)..(100): n is a, c, g or t
  misc_feature (105)..(105): n is a, c, g or t
  misc_feature (112)..(112): n is a, c, g or t
  misc_feature (131)..(131): n is a, c, g or t
  misc_feature (207)..(207): n is a, c, g or t
  misc_feature (240)..(241): n is a, c, g or t
  misc_feature (244)..(244): n is a, c, g or t
  misc_feature (269)..(269): n is a, c, g or t
atatatcttcagcattttgtacatgttctttaattttattcttttccttcacaattgagcacncagtnaactgaaatataaaatgagactcngattttgntaaanatttatnattttgaccacatctaatnatttctatctttrtcycaattatattagattatsagacctacgcttctttttactagtatcagcacttttattttnatatttwttttccactcatttttaataaataanngrnaaaatgcaataaaataktcatatant

SEQ ID NO: 302 - DNA, 281 bp, Homo sapiens
  repeat_region (1)..(281): mer112
  misc_feature (64)..(64): n is a, c, g or t
tccagaccagtggctttcaaactttttttgactatgacccacagtaagaaatacattttacatnatgacccagtacacacatacatatatataactgaaacaaaagtttcataaaacaatacttacccttactatatgtaatgcactctgatattttctattctattctattctattttattttttttaaaaaaaaatgctggttataacccactaaattgatttcataacccactaatttttgggtcacracctgcagtttgaaaaacactgctctagaa

SEQ ID NO: 303 - DNA, 519 bp, Homo sapiens
  repeat_region (1)..(519): mer113
  misc_feature (463)..(463): n is a, c, g or t
tttcccaaacttcagtcattttcataccaccttcatgatttttgccatatctatataccacctgtactatttatttacttaatttttctttaaattgactcactttttttatttaaataaatttattttaaaaggaaactttatatcactaccataaatggaaaaccagtatcacttgccataaatagaaggtaaccataaaaataaattacaatgaaaacaaaacaatgttattaaattctagctagatactgttgcctgcctactgcaaggctctgagcctgaggcctgctctctctttgttaaaaagagagattagcaagtgttagagaggtgttaaagacatactaagcaccaaactgagactttctccttgatgtaatcagaaggattgaaagagaattgaaaagggaataactttctcactatgtgattcaatgttatttaatgccatatccatgtnctacctaaaatcatctttaaataccaccagtggtacatatcccacactttgggaaa

SEQ ID NO: 304 - DNA, 648 bp, Homo sapiens
  repeat_region (1)..(648): mer114
  misc_feature (11)..(11): n is a, c, g or t
  misc_feature (567)..(567): n is a, c, g or t
  misc_feature (582)..(582): n is a, c, g or t
  misc_feature (604)..(604): n is a, c, g or t
  misc_feature (612)..(612): n is a, c, g or t
  misc_feature (628)..(628): n is a, c, g or t
  misc_feature (631)..(631): n is a, c, g or t
tgaagttgttnacattttaattgattcttctctawagaccataatatttttaattgagaaaatattctctctataggtgctgaggtacctggtaagctcagagcaaattctactaaatggargatattbtcaattttaattttttttttattgaaatgtgtaaatatttcagcccaaatatttttataggtattatctttttttgtctccattcagaatacctttctttgacaaatatttttacaagacaaaactcatcaaataaattgtctctatttatgattcttttgaatattttaccaaatttagatgctgcaaaattataggccttctcaattttattccattctagtacagaatataaatttatccaattaaaaatagaagctccatcaaaagattcttcccataagttaagatattccaaagtacaattatagaattatagaatttcaaaattaaatcttgtatacacatttgagctctcattatttaatttgttcagttcctcccttgmttttgtaggaataaatttcaatgtctttctgtgtggcaagctttgttttnaataattacaattynctaaaactttaaaaagctgaanttttttgntctctatttattgaanacnttgattaaagatttcca

SEQ ID NO: 305 - DNA, 655 bp, Homo sapiens
  repeat_region (1)..(655): mer115
  misc_feature (25)..(25): n is a, c, g or t
  misc_feature (29)..(29): n is a, c, g or t
  misc_feature (44)..(44): n is a, c, g or t
  misc_feature (149)..(149): n is a, c, g or t
  misc_feature (284)..(284): n is a, c, g or t
  misc_feature (332)..(332): n is a, c, g or t
aaggctccactctggccctcctccngctncatgcccttccccanggggtaaagagtctgtggggccaaggggatatgcccaccygaaayccatgcccccctttctagaccacgctccaggtacctgggactccagaattccctgtccanatagccccgagcctgcttccagggccttcttccytttccctaggtctgtcctccagagggtggaccgtgccaccagtgtgggcacccctaggcctgagagatggccaaggggtagctgtttgtaggggggttagntgtggacagagcttggacatgcgggctggggtgtccacatacatgcanaggaggccccttatggtgtaggatggagcygggggtgggaagagaagggggagtaggccaggggccaggggctggctctcccccaggcaggctgccatgttctggcatggaactccaaggagtctgagaattctaaatttgaacctggccttccaggtcattatgaaggtatatttgtcaaggtaggagaatagaacatattttaatttaacagtttgttagcttgatttataacttttaaatatttagacatatggtatgtgggcctccatttgtactcttgccctaggccctrcaaatgttaggggtgggcctgggttctg

SEQ ID NO: 306 - DNA, 84 bp, Homo sapiens
  repeat_region (1)..(84): mer116
tattaggttgaaccatatgaaattgctaatattcgaccatttttgacctacaaaaatggcaatttcatatggttcaacctaata

SEQ ID NO: 307 - DNA, 197 bp, Homo sapiens
  repeat_region (1)..(197): mer117
  misc_feature (172)..(172): n is a, c, g or t
cagggatggcaaataggtttcatctcatgtgycaactctgatcgattggtagtggctgcctggagtgctgtgttgagaaggattctgaggctgyatctgggctcagtgggaaagagtgctgtgattgattagtgatgtctgccatgggcacaggagggggaagtagcagcanatatgctatgtatttgccatccctg

SEQ ID NO: 308 - DNA, 717 bp, Homo sapiens
  repeat_region (1)..(717): mer118
  misc_feature (427)..(427): n is a, c, g or t
  misc_feature (476)..(476): n is a, c, g or t
  misc_feature (495)..(495): n is a, c, g or t
  misc_feature (550)..(551): n is a, c, g or t
ataaaaataaaactattcacaattctagtattcaatatccatctagttgccaatgtaaagaatcagtatcatacttcatgcatgttacatctagacctacatatatacaaatttaagagtaatatgaattgtttaatattgcaaaatgttcctcagctaccatgtgcaactgttgtgaatactgtgctaatttgtgagtacctctggaaccacaaattggaacatgaagagaagcaagaaaatggacacttagcactactgggaaatgatactttgttaagttatgcaagaatctattgcattcatgctatctgaggagaggaaggatttgacaagttaattaatttgttttcttttctcttacctaagtgcttctgctgctcaaatcctccctacactctaaagcagtgtctatctctgacgtcancagcagcggcacaacccacaaaccttcatggcatttggacacagtcacnccttttgttttgaggacanagggcaagagatgtggagaagcatttccctggggcctgaayagtgttagtcacannagagtagatgtttagggttataggttgtgctgtgccagtactgagtaccagatcccaagtgacagaggtacccatgtgttctttatttaataaatgtatgtgtgtttgtgatatgtggggccctctaaagcatggggcccagggcaggggcccctcttgcctgggt

SEQ ID NO: 309 - DNA, 508 bp, Homo sapiens
  repeat_region (1)..(508): mer119
  misc_feature (377)..(377): n is a, c, g or t
tagagcagaggttcccaaactttctcagttcatagtgcccttagtgtctcagtaattttttcatagtgcccttaggcagtgtctcagtaattttttcatggcacccctaggccaaaagaaatacctaacagttcyatttattaagtagttaggtccaaacaacttaataagtatttatgtcctaacaacttagtagccatttgaaaaaataatacacataaattgaaagaaaaaaaaaaaatatttttatttcattcttaaataaccacaattacttactaatgggatgtgtgtgcctgttgggcactgcacaacttctcaaaccttggaatcagattggacactgccaccctcatttcctgttccacattgattgnttttcacatagtacttgctttttatcacagcaaccactgaaaacccagcttcacaaagatatgatatcatcaaaaggaatgtagcacacatgatctaatgttgaaactgtgaactacctcaagctagtagt

SEQ ID NO: 310 - DNA, 1126 bp, Homo sapiens
  repeat_region (1)..(1126): mer11a
tgttgcgggaagtcagggaccccgaatggagggaccggctggagccryggcagaggaacataaattgtgaagatttcattttaatatggacatttatcagttcccaattaatacttttataatttcttatgcctgtctttactgcaatctctgaacataaattgtgaagatttcattttaatatggacatttatcagttcccaaataatacttttataatttcttatgcctgtctttactttaatctcttaatcctgttatcttcgtaagctgaggatgtacgtcacctcaggaccactgtgataattgtgttaactgtacaaattgattgtaaaacatgtgtgtttgaacaatatgaaatcagtgcaccttgaaaaagaacagaataacagcgattttagggaacaagggaagacaaccataaggtctgactgcctgcagggtcgggcaaaatagagccatatttttcttcttgcagagagcctataaatggacgtgcaagtaggraagatatcgctaaattcttttcctagcaaggaatattaataattaataccctgggaaaggaatgcattcctggggggaggtctataaacggccgctctgggaatgtctgtcttatgcagttgagataaggactgaaatacgccctggtctcctgcagtaccctcaggcttactagggtggggaaaaaaccccgccctggtaaatttgtggtcagactggttctctgctctcgaaccctgttttctgttgtttaagatgtttatcaagacaataygtgcaccgctgaacatagacccttatcagtagttctgattttgcccttgtcctgtttcctcagaagcatgtgatctttgttctcctttttgccctttgaagcatgtgatcttgtgacctactccctgttcttacaccccctccccttttgaaatccttaataaaaacttgctggttttgaggctcaggtgggcatcacggtcctaccgatatgtgatgtcaccccyggaggcccagctgtaaaattcctctctttgtactctttctctttatttctcagccrgccgacacttatggaaaatagaaagaacctacgttgaaatattgggggcaggttcccccgata

SEQ ID NO: 311 - DNA, 1096 bp, Homo sapiens
  repeat_region (1)..(1096): mer11b
  misc_feature (599)..(599): n is a, c, g or t
tgttgcgggaagtcagggaccccaaacggagggaccggctgaagccatggcagaagaacatggattgtgaagatttcatggacatttattagttccccaaattaatacttttataatttcttatgcctgtctttactgcaatctctaaacataaattgtgaagatttcatggacacttatcacttccccaatcaatacccttgtgatttcctatgcctgtctttactttaatctcttaatcctgtcatcttcrtaagcttcatgagctgaggatgtatgtcgcctcaggaccctgtgatrattgcgttaactgcacaaattgtttgtacagcatgtgtgtttgaacaatatgaaatctgggcaccttgaaaaaagaacaggataacagcaattgttcagggaacaagagagataaccttaaactctgactgccggtgagccrggcrgaacagagccatatttctcttctttcaaaagcaaatgggagaaatatcgctgaattctttttctcagcaaggaacatccctgagaaagagaatgcgyacctaggggtaggyctctgaaatggcccccctgggagtggcctgtcttttatggtngaaactgcagggatgaaataarccccagtctcccatagcgctcccaggcttattaggawgaggaaattcccgcctaataaattttggtcagaccggttgtctgctctcaaaaccctgtctcctgataagatgttatcaatgacaatgcgtgcccgaaacttcattagcaattttaatttcgccccggtcctgtggtcctgtgatctcgccctgcctccayttgccttgtgatattctattaccttgtgaagtacgtgatctctgtgacccacaccctattcgtacactccctccccttttgaaaatccctaataaaaacttgctggtttttgcggcttgtggggcatcacggaacctaccgacatgtgatgtctcccccggatrcccagctttaaaatttctctcttttgtactctgtccctttatttctcaagccagccgacrcttagggaaaatagaaaagaacctacgtgattatcggggcaggttccccgata

SEQ ID NO: 312 - DNA, 1071 bp, Homo sapiens
  repeat_region (1)..(1071): mer11c
  misc_feature (563)..(563): n is a, c, g or t
tgttgcgggaagtcagggaccccaaacggagggaccggctgaagccatgrcagaagaacgtggattgtgaagattttatggacatttattagttccccaaattaatacttttgtaatttcttatgcctgtctttactgcaatctctaaacataaattgtaaagatttcatggacacttatcacttccccaatcaatacccttgtgatttcctatgcctgtctttactttaatctcttaatcctgtcagctgaggaggatgtatatcgcctcaggaccctgtaataattgcattaactgcacaaattgtacagcatgtgtgtttgagcaatatgaaatgtgggcaccttgaaaaaagaacaggataacagcaattgttcagggaataagagagataaccttaaactctgactgccggtgagccaggcagaacagagccatatttctcttctttcaaaagcaaatgggagaaatatcgctgaattctttttctcagcatggaacatccctgagaaagagaatgcgcacctrggggtaggtctctgaactggcccccctgggcgtngcctgtctcttatggtcgagactgcagrggtgaaatagactccagtctcccatagcgctcccaggcttattaggaagaggaaattcccgcctaataaattttggtcagaccggttgatctcaaaaccctgtctcctgataagatgttatcaatgacaatggtgcccgaaacttcattagcaattttaatttcgcctcggtcctgtggtcctgtgatctcgccctgcctccacttgccttgtgatattctattaccytgttaagtacttgatgtctgtcacccacacctattcgcacactccctccccttttgaaaatccctaataaaaacttgctggtttttgtggcttgtggggcatcacggatcctaccaacgtgtgatgtctcccccggatgcccagctttaaaatttctctcttttgtactctgtccctttatttctcaagccagccgacgcttagggaaaatagaaaagaacctacgtgattatcggggcaggtcccccgata

SEQ ID NO: 313 - DNA, 897 bp, Homo sapiens
  repeat_region (1)..(897): mer11d
tgtagggagaccccctgaaactattgctacggaataaaagatgaaatgctcctgattattgtaaatacaaaattgcatgcaggattgtgtaaagacaatgccaggttggactgccagaacgagccaacagcgcgtgatgtgcttccccctgcagagagcctatgaatggacgtgcagtcagggaggtttcacatcaccaagattcctatcccagaaaagcagatgttcatagctctgggaatggaatgcgacccttgtggagagcctataaacggacgcatggggggcgcctgtccatatggataagatagggctataaacgccctcatcttgccacggctcttctaggcctctttagggttaaggcatactcccttctgagaatttctggtctaaccggttgtctagcttcacgtcctgtttccatggattgtttgtaaccagcttttgttgcaattgttactgctgattaatatcttgctaatcataggttatggaaagaytgtgtttctgttttaaggctctgttagaaattactgacgcacacactatattgtaaattcttatctctgtatactgtacttctacatacaaatgtactgtacttctacatacaaatgttatgttaaagaattacttcatccccatgtgaccatctcacctcataatcaaatgaccctaaatccctcactaacctacccccgccctcactaaacttaataataaatgctggtatatccagtgcattgttggcaccgtgggaccagaaggcggtgacccccctggacccagctttcactatcttgtgtgtgtctattatttctcaacctgccgatccgcctaggagcaaagagagagccccgttgcattgcgggctgctggccagatcccgcaata

SEQ ID NO: 314 - DNA, 467 bp, Homo sapiens
  repeat_region (1)..(467): mer1a
gctgcacagcaggaggtgagcggcgggcgagtgagcgaagcttcatctgtakttacagccgctccccatcactcgcattaccgcctgagctccacctcctgtcagatcagcggtggcactagattctcataggagcgcgaaccctattgtgaactgcgcatgcgagggatctaggttgcgcgctccttatgagaatctaatgcctgatgatctgtcgctgtctcccatcacccccagatgggaccgtctagttgcaggaaaacaagctcagggctcccactgattctacattatggtgagttgtrtaattatttcattatatattacaatgtaataataatagaaataaagtgcacaataaatgtaatgcacttgaatcatcccgaaaccatcccccccccctggtccgtggaaaaattgtcttccacgaaaccggtccctggtgccaaaaaggttggggaccactg

SEQ ID NO: 315 - DNA, 337 bp, Homo sapiens
  repeat_region (1)..(337): mer1b
caggggtccccaacccccgggccgcggaccggtaccggtccgtggcctgttaggaacygggctgcacagcaggaggtgagcggcgggcgagtgagcattaccgcctgagctccgcctcctgtcagatcagcggcggcattagattctcataggagcgcgaaccctattgtgaactgcgcatgcgagggatctaggttgcgcactccttatgagaatctaatgcctgatgatctgaggtggaacagtttcatcccgaaaccatccccgccccccggtccgtggaaaaattgtcttccacgaaaccggtccctggtgccaaaaaggttggggaccactg

SEQ ID NO: 316 - DNA, 345 bp, Homo sapiens
  repeat_region (1)..(345): mer2
  misc_feature (81)..(81): n is a, c, g or t
cagtcggccctccgtatccgtgggttccacatccgtggattcaaccaaccgcggatcgaaaatattcagaaaaaaaattgnatggttgcgtctgtactgaacatgtacagacttttttccttgtcattattccctaaacaatacagtataacaactatttacatagcatttacattgtattaggtattataagtaatctagagatgatttaaagtatacgggaggatgtgcgtaggttatatgcaaatactacgccattttatatcagggacttgagcatccgcggattttggtatccgcggggggtcctggaaccaatcccccacggataccgagggacgactg

SEQ ID NO: 317 - DNA, 218 bp, Homo sapiens
  repeat_region (1)..(218): mer20
cagtggttctcaaccgggggtgattttgccccccaggggacatttggcaatgtctggagacatttttggttgtcacaactggggggggggratgctactggcatctagtgggtagaggccagggatgctgctaaacatcctacaatgcacaggacagcccccacaacaaagaattatccggcccaaaatgtcgatagtgccaaggttgagaaaccctg

SEQ ID NO: 318 - DNA, 798 bp, Homo sapiens
  repeat_region (1)..(798): mer20b
  misc_feature (145)..(145): n is a, c, g or t
  misc_feature (437)..(437): n is a, c, g or t
  misc_feature (525)..(525): n is a, c, g or t
cagtggttctcaactaggattgtattaccccctaggggacatttggcaatgtctggagacattttttggttgtcacaatgattgggggggrtgctactggcatttagtgggtagaggccagggatgctaaacatcctacaagcantgcacaggacagtcccccacaacaaagaattgtcctgcatcccacatgactttcaaatgtcccactagacattcatgtaggtgaaaaaacctgtttataattatctgagcctagaacctaactctgttttacatataaacacaaagtattttttgcatagttttaatatacactgaattttctaggaatgcaactacvattgtatgtaaattgagggaagattgtactttgttttgtttagaactttaccaaagagttgttcaccattttggaaaatcatatcactaatggncaatactcgctcatggtatttgagttgccaatacaacacacctgtatcagtctgcatttgtagctgtcacattcacggtgattctatngtataggtgcaagcatctgactacttcattatgtcttctagtgtagtcatgcctgagcatttacatattgaaatacatattattttattataaattactttccttttttctcttttatattacagttagagcattatattgattttttttaaaattaatgtgtataggtaggttatattatctatgaatttcatttcaggataaataaaagaggcattacaaaatatttgttataaaaaggggtattgggtctgatagggttgagaaccactg

SEQ ID NO: 319 - DNA, 933 bp, Homo sapiens
  repeat_region (1)..(933): mer21
  misc_feature (226)..(226): n is a, c, g or t
  misc_feature (580)..(580): n is a, c, g or t
  misc_feature (608)..(609): n is a, c, g or t
gccctyctrttkcagraaaacctctctcaaaccatgttttycctctgctstcataccacgacaacagtcgtcaacacagaagacttctgtgaccaaatgtgtggaggattttccccacacaccaagcagcagacaccagctgggcgtcctccaaytcagttccgacactgtctacctggagatagcgtcagatcccacaggttgaggtctcagtccccaagactgnccccaccttcagayacagttgcaagyccgggyctctggaacttctgaccaactggcttcaarttggggttcccacgacacctctttaggttcgaytaatttgctagagtggytcacaaaactcarrgaaacacttattawgtttactggtttattaatagatgatatttcaaaggatacagatgaagagatacatacggggcggtctggaagrkcccagcgcaggagcttccgtcytgatagrrttggggttacaccctccagattcttcaccttctgtyagcctccacgtgttcagctctccagaagctcyctgaaccctgtcctttgggccttttatggagayctcattggntgtccatgactgaagcatggacgaytgnnawaatgtgattggrcaaaaagggtctgatctaatcccagcaaggyctgtccagattcttcttggtctctttgtgcagcattccttcctccagggtatggggcaggaccycctctggaatgagggtcttacgacccacaatcagattatagagtcctgccttgggcggmtgaaargaggrcargagaaggycagagaratattctgtttcctgaggcctaaagcacctctacattatagcgaaagactgtaaccatggtcatgtgagttatggacaagaaccatggacaaaaacacatatacaatcatatcccacctcccaacgc

SEQ ID NO: 320 - DNA, 795 bp, Homo sapiens
  repeat_region (1)..(795): mer21b
  misc_feature (404)..(404): n is a, c, g or t
  misc_feature (408)..(409): n is a, c, g or t
  misc_feature (436)..(437): n is a, c, g or t
  misc_feature (546)..(546): n is a, c, g or t
  misc_feature (672)..(672): n is a, c, g or t
  misc_feature (674)..(674): n is a, c, g or t
  misc_feature (717)..(717): n is a, c, g or t
  misc_feature (722)..(722): n is a, c, g or t
tcaacacacaacacttctgtcaccaaacgtgtggrrrtttttccccacacacaaacaaktcttcagttctgcggcggacaccarctgggtgtcctccaattcarttcagttctgacactawctacctrgagatagcgtcagatcccacaggtttaagggctcagtcccacaagactgcccccacttcagatrccagtcgcaagtctrggttktcacccgtacttctgaccaactggctataaattgttcccacgacccctctttaggttcgattaatttgctagaatrgctcacaraactcagggaaacacttatatttaycggtttattataaaggatattacaaaggatacagatgaacaaccagatgaagagatrcatagggcgaggtmtgggagagtccngggnncaggagcttccgtgccctctctggstnnrccaccttccwggcacctccacgtgttcaccaacccggaagctctccgaaccctgtccttttgggtttttatggaggcttcattacgtaggcatgaytgattacatcantggccattgattatcaactcaacctycagcycctctccyctccccagaggttggagggtggggctgaaagttccaaccytctaatctgccttggtctttctrgcgaccagcycccatccwgragcntnctaggggctgcccrccakgagtcgmctcattagmacaaaagrncrtynctattacccaggarattccaagggttttaggagytctgtgtcaggaaccggggtcaaagaccaaatattagat

SEQ ID NO: 321 - DNA, 1503 bp, Homo sapiens
  repeat_region (1)..(1503): mer22
gtgatggctgcacgctcggtccaggaagaggcggaggaagcccaccgctcctgacattggccttctaggaaaggcggtgttgcatcccacctgcacttcctctctgattcttgagggccaaccgcttcctccgctcctggggaaagtgccttctagcaccgaatcttttggctgccacggatgtcagggagccaacgggactgggttttggctgggtgcaggggaggttgcgtcaggggtactagccggcggcgggctgggggtggggtgtactttgtccaaactcccggctcctctggcgggcctccctgaacgtggcgtggactcgcgcacaggccctgtctcgcaggttttcaggtgcgcttggcttttcctccgctttgtggggcaggtctccagtgcccccggcgcacgcctggacatcactgtccgtctcgtcgtcgcccctacggcctcaaagacacacgctgcctgcatgtgctcttgggggacgacagtgcacatgtggacacactggctccagctcggactcgcctctgtctctctttgcccgtgtcgccggaagccgcctcgggttgccggagccctcgggccttggagatgaaggcaggcccctgctcctgccaggaaggagggaggcagtgggctcatgggtcggtgcctttgcagccgacagcacgtgcggccctggggatcttcctgtgccccggcgagaccctttccgcctcactgcattggaaccccattcccgatcacccgctgggatccatcatcggactccaagaggagtccgcgcagccagccggcaccccgaagctcctccttcagcgggaaccgaagcagaagagcgatcaaggaggtcctcaccacaggactcctatgggtccgaccctgggtctcccgcaggcccctctggcagtcctcttcccacccgccgcctcggcttcgccgccgccgccgcaacctccagcaccgccccccaggccccgcagccgccgtcgccgccattttttaaagggtcgcagcctgactctgcggagtaagggggggtggagcgggggagtcgctcgccagcatgcgcgagcccgagccgccgcttgggtcacagtgaaagccaccgttgcccggggatgggtccctgacacttggggaagtaggagccctgtgtgatcgtgcgtctgagtctgggctgagaccagtcctggccagggcagttaccaggacggtctcggaggccgggattcgcggagggtccagcagcaggaagaaaccccaggaggaagaaacctcagacagatcgccggcgaggcagcgcgggatcccagcctcaggcgtgcgcggacggtgtgcgggtgagtctccccaaaagtggagcccttgtgatgacgagcacaggtccgcctgcgtgcccgtgggcggctctctcaccggtggctctcagtcgcggagagcagaacccgcagcttcaggggctgctgcgggagggtgttccctgctgtacgt

SEQ ID NO: 322 - DNA, 434 bp, Homo sapiens
  repeat_region (1)..(434): mer28
  misc_feature (122)..(122): n is a, c, g or t
  misc_feature (132)..(132): n is a, c, g or t
  misc_feature (382)..(382): n is a, c, g or t
cagttgacccttgaacaacatgggtttgaactgcgtggrtccacttatacgcggattttcttccatctctgccaccctgagacagcaagaccaacccctcctcctcctcagcctactcaacntgaagacgangaggatgaagacctttatgatgatccacttccacttaatgaatagtaaatatattttctcttccttatgattttcttaataacattttcttttctctagcttactttattgtaagaatacggtatataatacatataacatacaaaatatgtgttaatcgactgtttatgttatcggtaaggcttccagtcaacagtaggctattagtagttaagttttkggggagtcaaaagttatacgtggatttttnactgcgcggggggtcagcgcccctaacccccgcgttgttcaagggtcaactg

SEQ ID NO: 323 - DNA, 209 bp, Homo sapiens
  repeat_region (1)..(209): mer3
cagcgctgtccaatagaactttctgtggtgatggaaatgttctatatctgcgctgtccaatacggtagccactagccacatgtggctaytgagcacttgaaatgtggytagtgcgactgaggaactgaatttttaattttatttaattttaattaatttaaatttaaatagccacatgtggctagtggctaccatattggacagcgcag

SEQ ID NO: 324 - DNA, 230 bp, Homo sapiens
  repeat_region (1)..(230): mer30
caggggtgtccaatcttttggcttccctgggccacactggaagaagaagaattgtcttgggccacacataaaatacactaacactaacgatagctgatgagctwaaaaaaaaaaaamaatcccamaaaaatctcataatgttttaagaaagtttacgaatttgtgttgggccgcattcaaagccatcctgggccgcgtgcggcccgcgggccgcgggttggacaagcttg

SEQ ID NO: 325 - DNA, 190 bp, Homo sapiens
  repeat_region (1)..(190): mer30b
cacgggtgtccaatcttttggcttccctgggccacattggaagaagaattgtcttgggccacacataaaatacactaacactaacgatagctgatgagctaaaaaaaaaaggtctgtgcataattttcgtgatatccaccaccacagataagcaaaaaagtccttgcattcaaagggttggacaccgctg

SEQ ID NO: 326 - DNA, 483 bp, Homo sapiens
  repeat_region (1)..(483): mer31
  misc_feature (99)..(99): n is a, c, g or t
tggtgacaaagactctctccttgaccaaactttagtcaggctcctctgagccctcttctcaactaagccccgaccttgggcyctgtccttggcctgcwnagtccagttttagcaagaatcctgctaagtcagtttagagagaatcccccaccctcgatatctgatcaggttcctcatcctccgccatcccccaggcgatgtctgatcaccctggcctgccttcagcaagaatcctgttaggtcagtttagcmagaatccccctacccctgatgtytcctcttagtaattttccatccactgacccccaccctgctccttggctataaatccccacttgtccttgctgtattcggagttgagcccaatctctctcccctactgcaaaatcccattgcagtggtccctgtacctatcgcaatggtcctgaataaagtctgccttaccgtgctttaacaagtgtcgttgaataattttctctgaca

SEQ ID NO: 327 - DNA, 485 bp, Homo sapiens
  repeat_region (1)..(485): mer31a
tgacaaagattctctgcttgaccaaactttagtcaggctcctgaaccttctcctaggcccatctgtgcacttccttgtaaaatccagttttagcaaagaaccctgctaagtcagtttagcmagaaccccccacccttgatatctgatcaccctcaatatctgatcgggttcctcatcctccaccatcccccaggtgatgtctgatcaccctggcctgtcttcagcaagaatcctgttaggtcggtttagccagaatccccctacccctgatgtttcctcttagtaattttccatccactgacccctcaccctgctccttggctataaattcccacttgcccatgctgtattcggagttgagcccaatctctctcccccactgcaaaatcccattgcagtggtccctgtacctatcgcaatggtcctgaataaagtcttccttaccatgctttaacaagtatcattgaataattttttctttaaca

SEQ ID NO: 328 - DNA, 466 bp, Homo sapiens
  repeat_region (1)..(466): mer31b
  misc_feature (70)..(70): n is a, c, g or t
  misc_feature (392)..(392): n is a, c, g or t
tgacaaagactctctccttgaccaaactttagtcaggctcctctgagccctcttctcaactaggcctcgnccttgggccctgtccttggcctgcwtagcccagttttagcaagaatcctgctaagtcagtttagcgagaatcccccacccttgatatctgatcaaattcctcatcctccaccatcccccaggtgatgtctgatcaccttggcctgccttcagcaagaatcctgttaggtcggtttagcaagaatccccctacccttgatgtctcctcttagtaattttccatccactgacccctcactctgctccttggctataaatccccacttgtccttgctgtattcggagttgagcccaatctctctcccctattgcagtggtctttncacctattgcaatagtcctgaataaagtctgccttaccattttaacwagtgtctgaataattttttctttaaca

SEQ ID NO: 329 - DNA, 4936 bp, Homo sapiens
  repeat_region (1)..(4936): mer31i
  misc_feature (193)..(194): n is a, c, g or t
  misc_feature (1230)..(1230): n is a, c, g or t
  misc_feature (1695)..(1695): n is a, c, g or t
  misc_feature (1939)..(1940): n is a, c, g or t
  misc_feature (1948)..(1948): n is a, c, g or t
  misc_feature (2165)..(2165): n is a, c, g or t
  misc_feature (2312)..(2312): n is a, c, g or t
  misc_feature (2375)..(2375): n is a, c, g or t
  misc_feature (2405)..(2405): n is a, c, g or t
  misc_feature (2415)..(2415): n is a, c, g or t
  misc_feature (2418)..(2418): n is a, c, g or t
  misc_feature (2467)..(2467): n is a, c, g or t
  misc_feature (2496)..(2496): n is a, c, g or t
  misc_feature (2504)..(2504): n is a, c, g or t
  misc_feature (2574)..(2574): n is a, c, g or t
  misc_feature (2823)..(2823): n is a, c, g or t
  misc_feature (3057)..(3057): n is a, c, g or t
  misc_feature (3453)..(3453): n is a, c, g or t
  misc_feature (3911)..(3911): n is a, c, g or t
  misc_feature (4073)..(4073): n is a, c, g or t
  misc_feature (4221)..(4221): n is a, c, g or t
  misc_feature (4699)..(4699): n is a, c, g or t
gttgtggtgccacaggcctctgacccagaacctgaagtatgcacctttgaaacctttgtcttcactcttggctgactgatcgggaatccattggtaagcccaactcttgagccagtgctccagatggcagtctgttgaagcatggtgaggatacattttgattcttaaggtccaggcttcttttgaaaggtannatacctcctgggctggaagwttttcctcctggctctttgtttcgagtggggattcactccctgactcctgggctggmagtctttttttggccctctgtgaggcctctctgttctctctatctgatccttctcctcccataggaacttctcagtcgactgaaacccctttctcgaacccctgcwgactatatgctccgccaactctgtccacctccttccttgttggcacgattttgctgaggataatttggaacttcagtggcctctttgggaaacttgagatctccccaaactggctcctctaagacctctcccttcccattgcctctgctcctccttctgccaccttcgatcttctcttcagtttccttgaatcctttgatatgtcccccttcaagcccctacctcctccacccctctatccacccctgccagacctttyccttctcactccagcccctcaactccctatagtcattagagctttaggcctcctgccmcawcagggggcgckcgaggggctcagggacacccaaaagcaaccacccgaggctgaaaaggctarctggaaacagactggatattttatccactcagatggactttggagacatccagacgtccgcttggtgtctcctcagtccctcacctaaaatttagtccacagcctctatcggattacacatcagggcaaagaaaatcttaaaggtctcctccacaaatattsgtrgaaagctttagccctcatgttgagyaggtaacctcaacttgtcccatctgccagaaacacaattcagataaaaatataaagtggggcaaagataatgagccaactctcttatattaaccagtgagttttgtattwctgtgtttatgcctgattcatggctaaaattttagaatkaaagctgtaagatctctatttgtatctgtctgtatgtttatgtatgtatgttatgtatatgtgatatttttctacctccagatggtattaccaaattaatttataaaatcccttaaggagctctattcaaantgacttagagataaatgagacttatataaattaaatattcctaaaactcccagaaatatarraactaacccaaatgcttttcaatttcacatgatttgggtaaatctttggcaaataaaattagtttaatattgttggtttaattaaaaaagggtatgtcttctgagttatcagcattaaatataatacaagcatacatatttattctacytgggtttagcagtatgttatctctactaaatatttaaagttataaaaattataaatttaacctaagaatgaatgaagaagtgcagtatccatcacttcatgcatatcaagcagagcagttaaacaaaacccatgtatttaacatttttaggtttttgttttgttgatgcttgcctaacatgaacatgctataaaattagttaacagaaaaataacttgaagtgatgttttagccttgtatgatgttataatatnatagcctaaaaacagtttccaaatatttggtgatgtgaaaccttagagttatgctaagttaaattaagtaatagatattcattaaataactagatcatttctaaggaagataaactactaaaacactactaaatctaagtttatgtttatatactttttggttcttatttttatatggtacagagaggctaaaatatattcgagcctcttaataaacatgaaaaattgtattataaaaagtagnntatacctntaaaaattatgagatggtatattcataaaatttgctaatgtgcacatacagaatcctggtatatgacagacagttcacaattgcctacttcccagtttttttctgtaaaagaaaagttattgatggttaaaaaatattatctatctatctatatatataattaaaactactagaaacaataagactgagggaaacaactttgtatgcaaaatatgcnagggtagtaggttagatttttaataaagtatataaaatatgaaaaatgtgttttcgttaaggaaaaaaagagtaattttgtcctaaagtaaaatgagtgattgttcaaaatgagaaaggggaaaagtgtaggactaaagctaaatanatattttttaaaagttgtaaaagttgtggaaaaggaattttatgtgtagtcaagatgctaatntatttataaggattttttaagctcaawtantgtactaatncanaactataatttggtttccgctctgttgaaaggacaaagttttcttaaantattgtaaaagatttttctttaccttttnaataattnacctaggaagcaaagattttgtgtcttatcaagataaattccctgtgcttcatgttgtctttatcatatntttaattacttttgaaagcaaatcttttcaattttaaaaaagctagggttatttttctcgagtatgttacttcctatatttacctctggaatcttttattgccactttgattaaatggataaccaagtatatttcatagcgacccgtaatcctatttaatcaagcgttcaaaccttttgacatttttgacaaacttcccaaaatcacaattttaaatgaagtctttttgacctccaacctaactttganattttccggagggcctctgaaaaatctctaaagaacttgttctttcaccttgtaaaagagagatattaaactaattaggcttatttcatatgttaaattacatgggaagcattgtcaaataagaaatggtgcttaaccttctttgagttatatttgtatgggtacctgttattaatataagtgttccagaaattgtatgaggttcctaaaaatttgtcaatacccttgctcttnatgatatgtccagcataattatgttatcagtcataattgcagttattatgttaaaatgytgtatgccacagaamtaaccaaatttgcttgtcaagtgaactctcatcagatctttaaccatgactattttaagtcttttgtcactcacagacagtttttgttttactctgattcttctctgaaagcatcttacaakcagctacagggcaaagtgcttcatcttcaaagaagctcatgagaaagacaggtactctgaaatataaacctctgatactttgcagaccatgccactggactgagtaagaatttccagacttgaatgaagaaactgacgggttcatgaaactgctaacccaagatcaagcagaacaagaattaattacatgggactgaatnaaccgatgaggatgatttatagttttttatgttttttgtttgaaacattgctggttctttaatgttttgttttccagattcaaggaaactttttcttttcttttaagctatctataacttacagcaatttggtaaagtatacttttgtgaacaaaawtgaaacaattacttttctctctacctgatccctccagaattcggaaactattagtgagtattcttattttcatggcaatatagttatttgcataagttcagtaagaatctgttctccttgtaacaggacacaattggaaacactggttatattaccaaggctttgactagaatgtcatatttgggaatgatgggcatagaattagctttaaggaactaaagttgactttatggaaccaatgcttacaaagccctcttggaaaaatcggcctggtacctggcttacasggttcccggccttncaggtgagtaaggaaagtcactttctggcaggcccaaggacctcaggatattttggggacctcaagaagagaggaattcacccaaatctatagatattgcaggtgaagtctgatggcgaaatccttggcttggcttcatagccttgagaagcttttaaaagnccaatctgagattccttattaaaagttccagcaaagcaaaccttaaaagagcctatgtggtcagtcactattcttgctgcatttatgtaaataatcaggccaagtctaatgagatcagacttattttgcaaacaagttagtcttactntgattatctttggtaaaaaggggagtgaggtgactatagagagaaattttatgtttcagtggaaaactatagcgcacccattatcagattctagtcctgttcattgtttttggttttattatctacctgcaaactggactggatcctgaatttttctagttttctccaatatctggctacaactctccaaactaatgtttccaatttttctcccacccttctggcttggaatcactgaaaattaaaactgcccttttcctgaagccctgcaagctgaaactggacgacttgatataaacttcagagaaatcaccacaacagatcatgtgtgggcagccttcatgacacccaaactgcaaaccaggaaagcctgccagctgccactgcctacctcactccagctgaagatgcttcaagcccagcatctagaaatcttattgaccggctgccctctggactcagaaactgagtttccaantgttaacctttgtttttattttattttcatagaaactaaactcccctcattaaaggcctgatggctcacaccatccagsaaatatcctctgctaccaagtcccagcagatgattcagctggtccttaatgaacaaaaggcmacccaacaagaaaatggacttatattgttcaaaggaaagaagaatgtctcttctttccttraacaagaggagggactgacaaagattctctgcttg

SEQ ID NO: 330 - DNA, 324 bp, Homo sapiens
  repeat_region (1)..(324): mer33
ctgcgctgtccaatacggtagccactagccacatgtggctattgagcacttgaaatgtggctagtccaaattgagatrtgctgtaagtrtaaaatatacaccagatttcaaagacttagtacgaaaaaaagaatgtaaaatatctcattaataatttttatattgattacatgttraaatgataatattttggatatattrggttaaataaaatatattattaaaattaatttcacctgtttctttttacttttattaatgtggctactagaaaatttaaaattacatatgtggctcgcattrtatttctattggacaacgctg

SEQ ID NO: 331 - DNA, 546 bp, Homo sapiens
  repeat_region (1)..(546): mer34
  misc_feature (540)..(540): n is a, c, g or t
tawtgaaggagatcagaatatgccaccccaaaatatgccactttggcataaggattattttgagctaaaggcacttgagaaacagcagrtgcaagaagagcactctgaccttcctcttttcttcctgaaagcaggagataaaactcccatgtgaaagacgttctctctataccaggaggaaggaaacattcttatcgtcagagacggggagtcgaggccgagggaaatctgtacgaacaaaccttgttaaactaacyctyatcttcctagtcacttctccacgatgaaccgccctagcccaaacccctttgtcttgtcacgttttcacaatttactactctttgtccaacctagtatawaagcgttcgactctaaccgcttctttgggtcttcatttccttatgagggctcccatgtacatgtaaaacatacttaaataaatttgtatgcttttctcctgttaatctgtcttatgtcagtttaattatcgggcccagccggaaactctaagagggtagaggwaaaatttttccttcyctnccatgg

SEQ ID NO: 332 - DNA, 1351 bp, Homo sapiens
  repeat_region (1)..(1351): 11mc5
  misc_feature (38)..(38): n is a, c, g or t
aaaaaaaaaayacatttctascctttccactgaaaagncctagaaacaatgactaatccaatagcaatgagtaccctyaggacccagattgtggtctctaaataccatttcccactaaaaggaaccagggctccttggagaaatggctaattccaggtctggggcaggaaatgtacaagatgagcctggaacatcttgtcataccagatagcaaggaagctataaaactactagggttgtgtcaaaaggactcaggagccaacttactggccaaagatgggacaatttgagcatcaataataactgcaatttaacacatcaaatatrtttaaatccatgagtttataataaaaaaatctaattggtcacctttggagtgatgctagggaaccaactcattattttgaaaactggtaaataaagggaaagaatcaagcatttatcttgcctttcctatataaactgtacctcwgggtaaccaaatagtwgatgagggaaatttctctttatagaagtattccagctaataaatgaagaaaaaattagaattagaatatcaccattttgcaacccctaatgaattaatggatctaggcaatgatcatcaatggctgctaacatcacaaaaactarasatytgcctcctgatggaartawacaacaccacctatgaaatattagtcttgccaaaaaaaaatcaaacctgaatctgatcaagcctctagatctaactaccaatttacaggaaatacagaggacagaggaacatgttaaatgacaccatrgggatgcaatcagcaaaatccagactgtgggaaactctacaggacaaatrttaacttttcttcaacaaataaattatgagaaaaaaaagatggaagaagaacctatagattaaaagagacttaaaagacatatcaaccaattacaatgtatggaccttatttggatcctgattcaaamaaatrtaaactataaaaatatatrtgtatacaattggaaatttgaacactgactagatatttgatgatattaaggaattattgttatttttaggtgtgataatggtattatagttattttataaaatagtccttatcttttagagatacatactgaaatatttatagataaaatkatatgatgtctgggatttgcttcaaaataatccaggagggaggaagtaggtggagctatagatgaaacaaaattggccatgaattgataattgttgaagctgggtgatgggtatgtggaagttcattatactattctctctacttttgtatatttgaaatttttctaatwttaaaaataaagaccaatttgttggacattaatttgttggcaa

SEQ ID NO: 333 - DNA, 1095 bp, Homo sapiens
  repeat_region (1)..(1095): l1mca_5
  misc_feature (10)..(10): n is a, c, g or t
  misc_feature (15)..(15): n is a, c, g or t
  misc_feature (27)..(28): n is a, c, g or t
  misc_feature (32)..(33): n is a, c, g or t
  misc_feature (36)..(36): n is a, c, g or t
  misc_feature (369)..(369): n is a, c, g or t
  misc_feature (704)..(704): n is a, c, g or t
  misc_feature (765)..(765): n is a, c, g or t
ttaakatagngaatnttcttcaaaatnnatanntanaaaacgataacaggacttctagtttccggtcccgcatgtaaggagcttgaaagttgccactccatcctaacaacaagtaaaaagctgaacaaactgaaaaatcaacaactcttcttagatccgtaagagaagtgaggtcatagggcaaaccactgcccccagaattggagagacaaacaggtgaatacagagaatcacaacttaccggagcagaaactcataagcagaaacctctgtgggaaccagtaccggggtaggaaaacctgaactgtaattgacaaattgctggaggctcagtgtggacaagtctgagagttgaaaactccaggggancccagtcattaggtgacccccacacttttgtgagttttacctccaggagcytgaccaggttctcacagtgaatatcggagaaaaatccccttgtgcttccggcaagaggagaggaaaaggaacaattctgaaatataccasagcattctgttcttttaacaaagtcctgccctcaggagaaactatttaaccagagcctaacctgttagagttttwtcagagcctaaccgacctgggggaagggaaatacccaactccagccccctctagccatcctgtcccacctaaagggagaaaaaaagctaagaaacacttgtgaagttcacagyccaggngcacaggctcactaaaagactgagaactaatcataggactatagaacacttccctcccccncataccttaccaccacattactaaaagcctatttacaacagttccttttacccagtacatcatgtccggctttcaacaaaaaattacaaggcatactaaaaggcaaaaaaaaaaaacacagtttgaagagacagagcaagcatcagaaccagactcagatatgacagggatgttggaattatcagactgggaatttaaaataactatgattaatacgctaagggctctaatggaaaaagtggacaacatgcaagaacagatgagtaatgtaagcagagagatggaaactctaagagaagaatcaaaagaaaacgctagaaatcaaaacat

SEQ ID NO: 334 - DNA, 1197 bp, Homo sapiens
  repeat_region (1)..(1197): l1mcb_5
  misc_feature (11)..(11): n is a, c, g or t
  misc_feature (52)..(52): n is a, c, g or t
  misc_feature (123)..(123): n is a, c, g or t
  misc_feature (288)..(288): n is a, c, g or t
  misc_feature (373)..(373): n is a, c, g or t
  misc_feature (755)..(755): n is a, c, g or t
tgacatgtaangagcttggaagttggcactcccttcaacaacaacaaaaagntgaacaaacagaaaaatcaatgacttttcttagatccataagagaagtgaggtcacagggcaaactgtcancctgaaatctggagagacaggcgcatgcagagaatcacagcagagctctgctttcctgaagcagaagcctctgggagcacaagctggtaggaaaacttaaatggtaattttggcaaattgctagaggctgagtgtggactagtttgagagtaagaaattctcggnggcccagtctaggggaacctccacactttcgtgggctttacctccaggagtcccactagtttctcacagtgaagatccgagaaanttcgcttcacggctctggcagggggaggggaaaagcaatcattktgaaatacgcccagagtattctccgtaacaaactcttgccctacaggagaaaatactttgccagagccttatcctagctttagggaagggtaatcacccaactccagccccctctagccttcctgtctcacctaaagggagaaaaaaagctaagaaacacttgtgaaggtcacagcccagggactcaggcccactaaaagactgagatttaatcataggattatagaacgtttcccttccccmataccttaccaccacatcaacagggctccagtataataacaatggattacagctgaaagaactgcaaaacmcagactctatttaagaaggagctnctagggaaacccaaagacaggagaggagacaaaaacaaggacaccggagtraagtttagcctctgacacctacagctacagcaaacagtaaacacagtctaactcttagccagataaacataaaacctcacattaaaggcctatttacttcagttccttttacccagtacatcatgtccggctttcaacaaaaaattacaaggcatactaaaaggcaaaaaaaaaaaacacagtttgaagagacagagcaagcatcagaaccagactcagatatgacagggatgttggaattatcagactgggaatttaaaataactatgattaatacgctaagggctctaatggaaaaagtggacaacatgcaagaacagatgagtaatgtaagcagagagatggaaactctaagagaagaatcaaaagaaaacgctagaaatcaaaacat

SEQ ID NO: 335 - DNA, 1536 bp, Homo sapiens
  repeat_region (1)..(1536): l1mcc_5
  misc_feature (490)..(490): n is a, c, g or t
  misc_feature (513)..(514): n is a, c, g or t
  misc_feature (521)..(521): n is a, c, g or t
  misc_feature (525)..(525): n is a, c, g or t
  misc_feature (556)..(557): n is a, c, g or t
  misc_feature (567)..(567): n is a, c, g or t
  misc_feature (575)..(575): n is a, c, g or t
  misc_feature (585)..(586): n is a, c, g or t
  misc_feature (589)..(589): n is a, c, g or t
  misc_feature (689)..(689): n is a, c, g or t
  misc_feature (692)..(692): n is a, c, g or t
  misc_feature (709)..(709): n is a, c, g or t
  misc_feature (711)..(711): n is a, c, g or t
  misc_feature (718)..(718): n is a, c, g or t
  misc_feature (725)..(726): n is a, c, g or t
  misc_feature (731)..(731): n is a, c, g or t
  misc_feature (741)..(741): n is a, c, g or t
  misc_feature (768)..(768): n is a, c, g or t
  misc_feature (917)..(917): n is a, c, g or t
  misc_feature (982)..(983): n is a, c, g or t
  misc_feature (985)..(986): n is a, c, g or t
  misc_feature (988)..(989): n is a, c, g or t
  misc_feature (1336)..(1336): n is a, c, g or t
  misc_feature (1338)..(1338): n is a, c, g or t
  misc_feature (1347)..(1347): n is a, c, g or t
  misc_feature (1482)..(1482): n is a, c, g or t
aggaacttccactttcagttctacttccacttaggatgtagaaagccacaaragaatattgctcccatcctaacaatragaaaaaaagccagataatctacaaaatyatacttttcttgagcccatcagagagctgaggtcacaaggcaaccaagtaaactgaattccaaagagtgacaagcccctccaaggagaracaggacacaygaactgtttcacctttggcagagcataggaggaagaggtggccaccataaaagcaggtaagaagaaatcagctaaaattttaataaattcttaaaggccaagtgtgggctagtgtgwcagtttagaaagctgggagccccagacacaagggaagtttgcactcacttgcaagctcttttccatgggcctccaccaggtgctcatgagaaagactgggggcagggcaggagactgaagaaagccctcctcagkggcacaggcatgcaggaggtgatcggctgcngctgggggacaggaacgaagccnncctcatnttcncagaactttcttyccyaaagcaaaagccttnngctrctgggntgasaggnagcaaacccnnttnctcccagggcckwrgcaaaracactmtwsyttytysrgaagmggtargagcyaaaccwtctgattctgggggaagaacagaagcaaaagccttctscycnygngraagggcagrraacwntntyaggyncaggatnntgcantgatacaaancagaggtcwgctactactgggagaggnacaggtcccatcccaaccacagatacaaggagagtttgactgccatggagagaggggcaggaacactgagaaagccccactcctgaggcccaggcgcacagggcctgcctaagactgaggctggaccaggacaacagagaacatccctnctcccaccacaagcctaacaagcaccaagtaacamagcaacagcagtctaccactgggggagggnnannannatggagagagactccctctgtggcacaggtatgcagggactactgaaagctgagggtggagcaggaacactgagaaaaaccctctagcaaaccagcccccacactaagcacaaggtaacagcagcccaccactagaggaatttgaagcctgtggtgcactgarggtaaccatagcaacaacaaaacccaaacccagctcaactcctgactagattgactcaacccccacactaaaagcctagcagaagaaaaggcatgcccatttccaggcataaatactatttacctcagtctctactgttcttctacacataatgtctrgcattcaataaaaaattacaagacananaaaaaaagnaaaaaaaaacaacccattgtcaagagacaaagcaatcaacagaaccagactcagatatgacacagatgttggaattatcagacaaagaatttaaaataactatgattaatatgttaaaggatctaatggaaaaanggtagacaacatgcaagaacagatgggtaatttcagcagagagatggaaactat

SEQ ID NO: 336 - DNA, 971 bp, Homo sapiens
  repeat_region (1)..(971): l1md1
  misc_feature (927)..(927): n is a, c, g or t
cttgtatccagaatatataaagaactctcaaaactcaacaataaaaaaacaaacaatctaattaaaaaatgggcaaaagacatgaagagacatttcaccaaagaagatatacaaatggcaaataagcacatgaaaagatgttcaacatcattagctattagggaaatgcaaattaaaaccacaatgagatatcactacacacctattagaatggctaaaataaaaaataatgacaayaccaaatgctggcgaggatgtggagaaactggatcactcatacattgctggtgggaatgtaaaatggtacagccactctggaaaatactttggcagtttcttataaagctaaacatacamttaccatatgactcagcaattayactcctaggtatttatcccagagaaatgaaaacttatgttcacacaaaaacttgtacacgaatgttyatagcagctttattcataatagccmaaaactggaaacaacccagatgtccttcaacgggtgaatggttaaacaaactgtggtatatccataccatggaatactactcagccataaaaaggaatgaactattgatacatgcaacaacctggatgaatctccagaaaattatgctgagtgaaaaaagccagtctcaaaaggttacatactgtatgattccatttacataacattcttgaaatgacaaaattwtagarwtgragarcagattcctggttgccaggggttagggacgggggtgggggtggagggaggtgggcatsstggagttccctgtggtgatggaaatgttctgtatcttcactgtatcaatgtcaatatcctggttgtgataytgtactatagttttgtaagatgttaccattgggggaagctggatgaagggtacacgggatccctctgtattatttcttacaattgtntgtgagtgtgtaattatttcaaaataaaaagtttaatttaaaaa

SEQ ID NO: 337 - DNA, 1088 bp, Homo sapiens
  repeat_region (1)..(1088): l1md2
  misc_feature (840)..(840): n is a, c, g or t
  misc_feature (920)..(920): n is a, c, g or t
  misc_feature (1044)..(1044): n is a, c, g or t
cttgtatccagaatatataaagaactctcaaaactcaacaataaaaaaacaaacaatctaattaaaaaatgggcaaaagacatgaagagacatttcaccaaagaagatatacaaatggcaaataagcacatgaaaagatgttcaacatcattagctattagggaaatgcaaattaaaaccacaatgagatatcactacacacctattagaatggctaaaataaaaaataatgacaayaccaaatgctggcgaggatgtggagaaactggatcactcatacattgctggtgggaatgtaaaatggtacagccactctggaaaatagtttggcagtttcttataaagttaaacatacamttaccatatgacccagcaattayactcctaggtatttatcccagagaaatgaaaacttatgttcacacaaaaacttgtacacgaatgttyatagcagctttattcataatagccmaaaactggaaacaacccagatgtccttcaacgggtgaatggttaaacaaactgtggtatatccatacmatggaatactattcagccataaaaaggaatgaactattgatacatgcaacaacctggatgaatctcaagaacattatgctgagtgaaaaaagccagtctcaaaaggttacatactgtatgattccatttatatarcattcttgaaacgacaaaactatagagatggagaacagattagtgrttgccaggkgttagggatrcaggraggaggtggatgtgrytataaarrggtagcatgagrgaatytttatggtgatggaacwgttctgtatcttgaytgtggtgrtggttacacgaatntatacatgtgataaaattgcatagaactaaatayryryryrataagtacaagtaaaactggcgaaatctgaataagatwnatggrttgtaycaatgtcaatwtcctggttktgatattgtaytatagttttccaagatgttaccattgggggaagctaggtgaagaacacacgggatcccyctgtattatttcttacaattgtntgtgagtktayaattatttcaaaataaaaagtttaatttaaaaa

SEQ ID NO: 338 - DNA, 1604 bp, Homo sapiens
  repeat_region (1)..(1604): l1md_5
  misc_feature (959)..(959): n is a, c, g or t
  misc_feature (1352)..(1352): n is a, c, g or t
ttaaaaacaaagcgggagacttccgcttccgggaagatggagtagacgtacttttccctattcctcccgctaagtacaactaaaaaccctggacattatatataaaacaaacataagaagactctgaaaggtggagagaagaaggcagaccggctagggacctcgggacccgaggaacgacacggtagtgagttccctgggttttctttttgcctcatatatcccagacttggagctgaagaagccggcaacccggaaacgccaacgggcacagacaaaaaaagccccaacaaaagcctgctctctctagccaaaggaccaggaaaggggcagcctagcaagacagaaaacttttagacaataaccgctctactccagccaaacaccacagaaaaaactgtggccccacccccacccacgccagcaaaggccgagtggggagcctagacttccaccctcaccaggctgtaacgaggcgccccaacacctccaccgggatggtgtcagagaaggccaagtagggagctgggactttcatccccgccaggcggtaatgaggcccmccttccccttgccmctgcggtgtcagtggagaccacgtggggagcctggacttccacccccacccggcagtaatgaggcgcccctccccctccctactggggtggtgtcagaggaggcctagtggagagtcgggactttcaccaccgcccagcggtaatgaagccacctcctcctcttgccmccatggtgtcagtggaggccacgtggggagcagtaatgaggcactcctacccctcccagccagggaggtatcagcggaggcctagtggggagccgaactcccacccccgcccagcagtaacgaggagcccctccctcacctcgggtgtcaacggaggccgagtggggaacctggacttctacccccacctggcagtaatgaggcagcgcccctncccctcycctgccggagcggtgtcagaggaagccggctaaaacagaaggtttaaataagatccagagtctcataacataatacccaaaatgtccaggtttcaatcgaaaatcactcgtcataccaagaaccaggaaratctcaaactgaatgagaaaagacaatcaatagacgccaacaccgagatgacagagatgttagaattatctgacaaagattttaaagcagccatcataaaaaatgcttcaataagcaattacgaacgtgcttgaaacaagaraaaagtagaaagcctcagcaaagaaatagaaagtctcagcaaagaaatagaagatataaagaagaaccaaatggaaattttagaactgaaaaatacaataaccgaaataaaaanctcaatgratgggctcaatagcagaatggaggggacagaggaaagaaccagtgaacttgaagatagagcaacagaaattacccattctgaacaatagagagaaaatagattggaaaaaaaaatggacagagcctcagggacctgtgggactataacaaaagatctaacattcgtgtcatcggagtcccagaggagaggaaaaagagrrtagtatttgaagaaataatggctgaaaatttcccaaatttggca

SEQ ID NO: 339 - DNA, 503 bp, Homo sapiens
  repeat_region (1)..(503): l1mde_5
  misc_feature (108)..(110): n is a, c, g or t
  misc_feature (112)..(112): n is a, c, g or t
  misc_feature (269)..(269): n is a, c, g or t
  misc_feature (289)..(289): n is a, c, g or t
  misc_feature (290)..(290): n is a, c, g or t
gaagtactctccttccccaccaggcctgagactcctcccctaccaagagataccaaggtgaccaggtggcaccagcaagagggatcctgccacaacaagcagcctggnnnancctggaagcactctctttccccatgggcctgagactcccctcccctacccagagacaccaggtatgcyaggcagcactagcaagggggatcctgccacaacaagcacctagcccaggaagcctctttatccccatgggcctgggagactcccttccncacccacatcccctcccctnnccccacctagagacaccaggcagcctggcctggggaagctccttctgccccctcaggcagcaccagcagggaccagtgggagccccagtagcaccagataaaccaagcagaccaaaatagcactgcaaaggctctgaaaattaaactgtcattggaaccacagcccacaaaaggtaggccaggacctacatgctaaacctaaacagggtgact

SEQ ID NO: 340 - DNA, 1089 bp, Homo sapiens
  repeat_region (1)..(1089): l1me1b_5
  misc_feature (296)..(296): n is a, c, g or t
  misc_feature (670)..(670): n is a, c, g or t
  misc_feature (765)..(765): n is a, c, g or t
  misc_feature (1003)..(1003): n is a, c, g or t
  misc_feature (1058)..(1058): n is a, c, g or t
  misc_feature (1065)..(1065): n is a, c, g or t
cagacttccgcttccggtaatggtggagtaagctcctaccggaccaaccctcccgcagataacaactataaactctggacaaaatacaaaaaacaactacttgaaggcactggagagtgaccaaaagcaggcagaaactggaggggagtcgacacctggaagaagggaatwgcacggagtgagttcccatttctacggctttttgcctgagagcaggccgcagttggtgcgtcgtacagatggctaaaacwtcagtagaaaacccgcggtcttactggcttgaagaaccagagaanagaattcggggcaaccacagccactggaaagtgaggggaaaatcccggaaaggagagagccagagagaggatccccaaattctgtgtataaactctgcccaaatctctggctgacccctgaaccacgcatgcgcggagcagactccaagcagcccagctaaagacaaaagaactgaactgagattggagctgccgcccaagaaacagagtttgcagttcgagtccagccaagytaactgcctactaaaacaaaagaaacaacactctttagagaaaaataacagaatccagagtctccacaatktaacattcatgatgtccaggatacaatcccaaaattatacmagataagaagaaacagraaaaatgtaatncatccttaagagaaaagaaaataaaaaccgaccctgagatraaccagatgttggaattaacagacaaggactttaaagcarctattataaatatnttcaatgaaataaaacaaaatatgctcacaatgaataaaaggataggaaatctcagcagagaaatagaaacgataaaaagaaccaaatggaaattctagaamtgaaaaatataatatctgaaacaaaaaattcactgaatagacttaacagcagaatggagatgacagaggaaagagtcagtgaacttaaagatagatcaatagaagttatacaatctgaagagcagagagaaaaawnatttawaaaaaaagwgmakagtctcacaaacatgtgcgacaatatcaaaaggtcnaacatanatgtaattggaatcmcagaaggag

SEQ ID NO: 341 - DNA, 911 bp, Homo sapiens
  repeat_region (1)..(911): l1me2
  misc_feature (647)..(647): n is a, c, g or t
  misc_feature (708)..(708): n is a, c, g or t
cttgtatccagaatatataaagaacgcctacaactcaacaataaaaaaacaaacaacctaattaaaaaatgggcaaaagacttgaataggcatttcaccaaagaagatatacagatggccaataagcacatgaaaagatgctcaacatcattagtcatcagggaaatgcaaattaaaaccacaatgagataccacttcacacccactagaatggctaaaattaaaaagaccgacaayaacaagtaytggcgaggatgtggagcaactrraactcycatacattgctggtgggaatgtaaaatggtacaaccactttggaaaayagtttggcagtttctcaaaaagttaaacacgcacctaccctatgacccagcaattccactcctaggtatttacccaagagaaatgaaaacatatgtccacacaaagacttgtacaagaatgttcatagcagctttattcataatagccmmaaagtggaaacaacccaaatgtccatcaacaggagaatgaataaacaaattgtggtatatccatacaatggaatattactcagcaataaaaaggaatgaactaytgatacacgcaacaacatgaacgaatctcgaaaacattatgttgagcgaaagaagccagacacaaaagantacatactgtatgattccatttatatraaattcwagaacaggcaaaactaatctataatgntagaaatcagaatagtggttgcctctggkgagggtraatgactggraagggrcatgagggaattttctggggtgatggaaatgttctatatcttgatcggggtggtggttacacgagtgtatacatttgtcaaaactcatcgaactgtacacttaaaatctgtgcattttactgtatgtaaattatayctcaattttaaaaaa

SEQ ID NO: 342 - DNA, 909 bp, Homo sapiens
  repeat_region (1)..(909): l1me3a
  misc_feature (647)..(647): n is a, c, g or t
  misc_feature (657)..(658): n is a, c, g or t
  misc_feature (705)..(705): n is a, c, g or t
cttgtatccagaatatataaagaacgcctacaactcaacaataaaaaaacaaacaacctaattaaaaaatgggcaaaagacttgaataggcatttcaccaaagaagatatacagatggccaataagcacatgaaaagatgctcaacatcattagtcatcagggaaatgcaaattaaaaccacaatgagataccacttcacacccactagaatggctaaaattaaaaagaccgacaayaacaagtaytggcgaggatgtggagcaactrraactcycatacattgctggtgggaatgtaaaatggtacaaccactttggaaaayagtttggcagtttctacaaaagctaaacacgcgcctaccctatgacccagcaattccactcctaggtatttacccaagagaaatgaaaacatatgtccacacaaagacatgtacaagaatgttcatagcagcattgttcataatagccaaaaagtggaaacaacccagatgtccatcaacaggagaatgaataaacaaattgtggtatatccatacaatggaatactactcagcaataaaaatgaatgaactaytgatacacgcaacaacatgaacgaatctcgaaaacattatgttgagcgaaagaagccagacacaaaagantacatactgnntgattctatttgcataaaatacaaaaccaggcaaaactaatcaatgntgttagaagtcaggatagtggttgttctgggaatagtaatgactgtaaggrarcatgagagggctttctggggtgctggtaatgttctgtttcttgatctgggtgctggttacacggctgtgttcartttgtgaaaattcatyaagctgtacacttatgatwtatgcayttttatgtatgtatattatayytcaataaaaaaaa

SEQ ID NO: 343 - DNA, 596 bp, Homo sapiens
  repeat_region (1)..(596): l1me4
  misc_feature (121)..(121): n is a, c, g or t
  misc_feature (435)..(435): n is a, c, g or t
  misc_feature (455)..(455): n is a, c, g or t
  misc_feature (475)..(476): n is a, c, g or t
  misc_feature (478)..(478): n is a, c, g or t
tttggcaatatctatcaaaatcacacatacatttaccctttgacycagcaatcccacttctaggaatttatcctacagacatacttgcaacatgtacaaaatgacatatatacaaagttantttattgcagcattatttgtaatagcaaaaaaytggaaacaacctaaatgtccatcaataggaaaatggttaaataaattatggtatatccatacaatggaatactatgcagctataaaaaagaatgaagaagatctctatgtactgatatggaatgatctccaggatatattgtttaagtgaaaaaagcaaggtgcaagaatagtgtatatagtatgctaccttttgtgtaaaaaagaaggaaaaataaaaatatatatatatatttgcttatatatgtataaaataactctggaaaaataaacaagaaactnataacagtggttgcctcttntggggggaggggaactgggnngntgggtggctgggggacatgtgggatggacagggatgggagggactgacttttcactgtatacctttttgtactttgtactttttgaaattttgaaccatgtgaatgtattacctattc

SEQ ID NO: 344 - DNA, 1089 bp, Homo sapiens
  repeat_region (1)..(1089): l1mea_5
  misc_feature (296)..(296): n is a, c, g or t
  misc_feature (670)..(670): n is a, c, g or t
  misc_feature (765)..(765): n is a, c, g or t
  misc_feature (1003)..(1003): n is a, c, g or t
  misc_feature (1058)..(1058): n is a, c, g or t
  misc_feature (1065)..(1065): n is a, c, g or t
cagacttccgattccggtaatggtggagtaagcccctaccggaccaaccctcccgcagaaaacaactataaaacctggacaaaatacaaaaaacaactacttgaaggcactggagagtgaacaaaagcaggcagaaactggaggggagtcgacacttggaagaagggagcwgcacggagtgagttcccatttctgtggcttttagcctgagagcaggccgcagttggtgcggcgtacagatggctaaaacwtcagtagaaaacccgcggtctttctggcctggagaaccagagaantgaatctagggcaaccacagccactggaaagagtggggaaaatcccggaaaggagagagccagagagaggatccccaaattctgtgtataaactctgcccaaatctctggctgacccctgaaccacgcatgcgcggagcagactcaaagcagcccagctaaagacaaaagatctgaactgagactggagctgccgcccaagaaacagagtttgcagttcgagtccagccaagataactgcctactaaaacaaaagaaacaacactcattagagaaaaataacagaatccagaatctccacaatktaacattcatgatgtccaggatacaatcccaaaattatacmacataagaagaaacagraaaaatggaatncatccttaagagaaaagaaaatcaaatccgaccctgagatraaccagatgttggaattaacagacaaggattttaaagcarctattataactatnttcaatgaaataaaacaaaatatgctcacaatgaataaaaggataggaaatctcagcagagaaatagaaacgataaaaagaaccaaatggaaattctagaamtgaaaaatataatatctgaaacaaaaaattcactgaatagacttaacagcagaatggagatgacagaggaaagagtaagtgaacttaaagatagatcaatagaagttatacaatgtgaagagcagagagaaaaawnatttawaaaaaaagwgmakagtctcacaaacatgttcgacaatatcaaatggtcnaacatanatgtaattggaatcmcagaaggag

SEQ ID NO: 345 - DNA, 2523 bp, Homo sapiens
  repeat_region (1)..(2523): l1mec_5
  misc_feature (6)..(6): n is a, c, g or t
  misc_feature (439)..(439): n is a, c, g or t
  misc_feature (898)..(898): n is a, c, g or t
  misc_feature (948)..(949): n is a, c, g or t
  misc_feature (967)..(967): n is a, c, g or t
  misc_feature (1101)..(1101): n is a, c, g or t
  misc_feature (1134)..(1134): n is a, c, g or t
  misc_feature (1144)..(1144): n is a, c, g or t
  misc_feature (1175)..(1176): n is a, c, g or t
  misc_feature (1267)..(1267): n is a, c, g or t
  misc_feature (1339)..(1339): n is a, c, g or t
  misc_feature (1723)..(1723): n is a, c, g or t
  misc_feature (1821)..(1821): n is a, c, g or t
  misc_feature (1839)..(1840): n is a, c, g or t
  misc_feature (1870)..(1870): n is a, c, g or t
  misc_feature (1950)..(1950): n is a, c, g or t
  misc_feature (1992)..(1992): n is a, c, g or t
  misc_feature (2164)..(2164): n is a, c, g or t
  misc_feature (2406)..(2406): n is a, c, g or t
  misc_feature (2494)..(2494): n is a, c, g or t
aatgtnttaaaaaattcactkaaaacataatasaagacttctgcttccggcyaagatggagtaacagggaccggatttaccctcctrcctgaaacaacyaaaacgcggacaaaatatatgaaacaacggttttcaagacattgracatcaggcagcgmaggacagcgatccctgrgagaagggaaacgaatgaggtgagccctrtgatcgccycagcttactgcctkgagatagtttccaggccacggcacagagaggagaaacccaggcagagcccggcggwctccctgagttgaggagacggagctgagagtycgrggaggccaaggctggctagagttcgcagggcagaataccagagaggagaaagccgcamagagagaacttctgagatctgcagagggtccccytcgagtcttcagctgagtactgaycagcncatgcatgcgaggaaacyacccgaggctagggaaagaaccmcacgaaaggattararggaacaatccccagagctcacacagggccgggaatagttcctgtttccaccagccagagtggaaaacctcataattcacggggcatcgggtagagtactcagaagggttttgcctcagtagcggggaaaaattagccctaaactaaacactgctctggtcccacctaacaaatcttaaaagcaagcctcgaaaagatcaaactgtttccaagtaacttaactgcatcccagaataaagctcaagaatatttawaggaatacaaaaatatccagcacccaamaaggtaaaattcacaatatctggcatccaatcaaaaattaccaggcatccaaagaagcaggaaaatacgacctataatgaggagaaaaatcaatcaatagaaacagacccagaaatgacanagatgatagaattagtagacaaggacatttaaamagttattataactctnnymwatatgttcaagragntaaagaaaaacatgaacataatgaagaaagagrtggaagatataaaaagacccaaatagaacttctagagatgaaaawtayaatrtctgaaatgaaaaatacactggatgagattaacagcagattagacactncagaagaaaraattagtgaacttgaagacatancaatagaaantatccaaaatgaaatacagagacaaagaaannaaaaayagacaaataaaataaagcgtcagtgagctgtgggacaacttcaagtggcctaayacacgtrtwattggagtcaaaaagaaagganagagagaatgaggyagaagaaatattggaagaaacgatagctgagaattttccaaaattgatgaaagacatnaatctacakattcaagaattccaatgaatsccaagyaggataratacagaagaaacaacacatctwgacatatcatagtcaaatcgyagaaaaccaaagayaaagagaaaatcttaaaagcagtcagagaraaacaacatattacgtacagggggacaacaatacaaattaaagctgactttttaccaggcacagtggaggccagaagacagtgggatgawatatttaaagtgctgaaagaaaagaactgtcgacccggaattctatatccagcgaaaatatctttcaaaaataaaggcaaaataaagacattctcagacaaacaaaagctgagataattcattaccagcagacctgcgctacaagaaatgttaaaggaagtcnttcaagcagaaagaaaatgacaccagatggaaacatagatctacacaaagaaatgaagagcgccggaaatggtaamtatacgggtaaatataaaaganatcctttcttattatttnnaatttctttaaaagataattggctgtttanagmaaaaataataacaatgtattgtggggtttataacatatgtaarcaaaatgtatggcaacaatagcacaaaggccggnaggggagaaatggaagtataytgttgtaaggttcttatactntacgtgaagtggtataatrtcatttgaaggtagactgtgataagttaaagatgcatattgtaaaccctagagcaaccactaagataacaaaacaaagagttatagctaataagccaacaaaggagataaaacggaatcataaaaaatacccaattaatccaaaaaaaggcanwaaaaaaaaaatggaacaaagaamagatgggacaaatagaaaacaaatagcaaratgatagatttaaacccaaccatatcaataattacattaaatataaatggtctaaacgctccaattaaaagacagagattgtcagaatggataaaaaaacgagacccaaatatatgctgcctacaagaaacccactttaaatataaagacacaaataggttaaaagtgaaaggatgaaaaatgatatntcatgttaacgccatccaaaagaaagctggagtagctatattaatatcagacgaagtggatttcagaggaaagaataccgccaagagncaaaaaaggtcattttataatgataaagg

SEQ ID NO: 346 - DNA, 990 bp, Homo sapiens
  repeat_region (1)..(990): l1p2_5
ataaaaaaattaatgagaagaggattctgggaagatggcagagtaggaagcaccaggaatctgtctccccacctagacaacaattgcactggcagaatctgtctgatgtaactattttggaactctggagtctattgaaggcttgcaacttccaggggaaggcttggatggtaaattgtggttaatttcggtcaatttcagctcttagcacagtagcagctacccatcccccacccccagccccgtggcaggcagctgtgcacgtgttcctggagcagcttgcacacagcttgcgggagccagggtgggcaaaaaggatcctgtcctccaaatatcggggatctgtgctctgatcgctgattgctgcttctgatcacagaggtgcagacaaagaggtggcggccattgttgtcgcacctcccyccattgttgcaagcccctccccctctggctgaagtgacttccaggggatttaaagggctagtaccctttctccgctttatttttcttttttccccttttgggagccagacattaaagactaggacattcaaaagcaactgcatatacggggaaaattagaaagtcaccgtgcatgcccagggaaaggcacaggctcagaaaagacctgagaagaccttaagtttacacctcaggctgatccttggcacagagacagcctacaacaataaaaacaaaacaaaaaaataacaaaaacacagcaaaccctggggaagagggagaatctgatttccagagttaccacattattagattcaaatgtccagttttcaacaacaacaacaaaaaatcacaaggcatacaaagaaacaggaaagtatggcccattcaaaggaaaaaaaataaatcaacagaaactgtccctgaaaaagacctgatggcagatctactagacaaagactttaaaacaactgtcttaaagatgctcaaagaactaaaggaaaacgtggagaaagtcaagaaaatgat

SEQ ID NO: 347 - DNA, 1727 bp, Homo sapiens
  repeat_region (1)..(1727): l1p5a1
  misc_feature (729)..(729): n is a, c, g or t
ggtggctggcaagatggccgaataggaacagctctggtctgcagctcccagcgagatcaacgcagaaggcaggtgatttctbcatttccaactgaggtacccggctcatctcattgggactggttagacagtgggtgcagcccacggagggcgagcagaagcagggtggggcgtcgcctcacccgggaagcgcaaggggtcagggaactccctcccctagccaagggaagccgtgagggactgtgccacgaggaacgrtgcattccggcccagatactatgcttttcccatggtcttcgcaacccacagaccaggagattccctcgggtgcctacaccaccagggccctgggtttcaagcacaaaactgggcagccgtttgggcagacaccgagctagctgcaggagtttttttttttcgtaccccagtggcgcctggaacgccagtgagacagaactgttcactcccctggaaagggggctgaagccagggagccaagtggtctagctcagtggatcccacccccacggagcccagcaagctaagatccactggcttgaaattctcgctgccagcacagcagtctgaagtcgacctgggatgctcgagcttggtggggggaggggcatccgccattactgaggcttgagtaggcggttttcccctcacagtgtaaacaaagccaccaggaagttcgaactgggcggagcccaccacagctccgcaaancggctgtagccagactgcctctctagattcctcctctctgggcagggcatctctgaaagaaaggcagcagccccagtcaggggcttatagataaaactcccatctccctgggacagagcacctgggggaaggggcggctgtgggcgcagcttcagcagacttaaacgttcctgcctgccagctctgaagagagcagcggatctcccagcacagtgctcgagctctgctaagggacagactgcctcctcaagtgggtccctgacccctgtgcctcctgactgggagacacctcccagcaggrgtcgacagacacctcatacaggagagctccggctggcatctggtgggtgcccctctgggacgaagcttccagaggaaggaacaggcagcaatctttgctgttctgcagcctccgctggtgatayccaggcaaacagggtctggagtggacctccagcaaactccagcagacctgcagcagaggggcctgactgttagaaggaaaactaacaaacggaaagcaatagcatcaacatcaacaaaaaggacgtccacacagaaaccccatccgaaggtcaccaacatcaaagaccaaaggtagataaatccacgaagatgaggaaaaaccagtgcaaaaaggctgaaaattccaaaaaccagaacgcctcttctcctccaaagaatcacaactcctcgccagcaagggaacaaaactggacggagaatgagtttgacgaattgacagaagtaggcttcagaaggtgggtaataacaaactcctccgagctaaaggagcatgttctaacccaatgcaaggaagctaagaaccttgaaaaaaggttagaggaattgctaactagaataaccagtttagagaagaacataaatgacctgatggagctgaaaaacacagcatgagaacttcgtgaagcatacacaagtatcaatagccgaatcgatcaagcagaagaaaggatatcagagattgaagatcaact

SEQ ID NO: 348 - DNA, 7678 bp, Homo sapiens
  repeat_region (1)..(7678): l1p_ma2
  misc_feature (513)..(513): n is a, c, g or t
  misc_feature (2757)..(2757): n is a, c, g or t
  misc_feature (4117)..(4117): n is a, c, g or t
  misc_feature (4115)..(4115): n is a, c, g or t
  misc_feature (7396)..(7396): n is a, c, g or t
gaaggcggaacaagatggccgaatagaagmctccaccgatcatcctccctgcaggaacaccaaattgaacaactatccacacaaaaarstaccttcataagaaccaaaaatcaggtgagcgatcacagtacctggttttaacttcatatcactgaaagaggcactgaagagggtaggaaagacagtcttgaattgccgatgccaccactccyccatkcccgggcagtggcwgwgtggtgtggagagagaatctgtgcgcttgggggagggagagtgcagkgattgtgagactttgcattggaactcagtgctgccctgtcacagtagaaagcaaaaccaggcagaactcagctggtgcccacggagggaacatttagaccagccctagccagaggggaatcgcctatcccagtggtcggaacctgagttccggcaagccttgccaccgcgggctaaagtgctctggggytctaaataaacttgaaaggcagtctaggccamaaggactgcaantcctrggcaagtcctagtgctgwactgggctcagagycagtggacttgggggacacatgacctaaggagacaccagctggggcagcyaagggagtgcttgcaccacccctcyctyaactccaggcagcacagctcacggctccgaaagagactccttccttctgcttgaggagaggagagggragagtaaagaggactttgtcttgcaacttggataccagctcagccacagtaggatagggcaccarkcagagtcmtgaggcccccwttccaggccctggctcccggacaacatttctagacacaccctgggccagaagagaacccgctgccttgaagggaaggacccagtcctggcaggatkcatcacctgctgactaaagagcgcttgggccctgaatgatcarcagcgrtacccaggcartactcastgtgggccttgggtgagactcagagacttgctggcttcaggtgtgactcagcacattcccagctgtggtggctatggggagagactccttytgcttgagaaaagsagagggaaaagtaaaggggactttgtcttgcaccttaggtaccagctcggccacagtgggrtagagcaccaagtaggctcttggggtccccgattccaggacttggctcttggatggcatttctggacctgccctgggccagaggagagcccactgtcctgaagagagagtcccaggcctggcagcattcaccacaagctgactgaagagcccttgggccttgagwgaacattggcggtagccaggcagtactctccatgggcctgggrtggtggtggccacagggagcgactcctttgcctgtggaaaggggagggaagagtgggaaggactttgtctcgtggtttgggtgccagctcagccacggtagaatagagcaccaggtagatttctaaggtttctgactccaggccctggctcccggatgacatctctggacctgcctgrggccwgggggaacttaccaccctgaagggaaggacacaagcctggctkgcttttscayctgctgattgtagagccctagggccttgagcgaacataggcggtagccaggyagtggttacagcaggccttgggtgagacccagtgctrtgctggcttcaggtctgacccagcacagtcccagtggtggtggccacaggggtgcttgtgtcaccmctcccagcttcaggcagctcagmacagagagagagactccatttgtttgggggraagtaagggaagagaacaagagtctctgcctggtaatccagagaattcttccggatcttatccaagaccaccaaggcagtacctctatgagtctgcaagaaccacagtgttaytgggcttggggtgccccctaawgcagatatggctacatgaccaaaarcttagatcayaacacccaagtccsttcaaatacctggaaagccttcccaagaagratgggtacaaacaagcccagactgtgaagactacaataaatacctaactcttcaatgcccagacactgacgaacatccacaagcatcaagaccttccaggaaaacatgacctcaccaaacgaactaaataaggcaccagtgaccaatcctggagaaacagagagatatgtgayctttcagacagagaattcaaaatagctgttttgaggaaactcaaagaaattcaagataacacagagaaggaattcagaattctatcagataaatctaacaaagagaytgaaataattawaaagaatcaagcagaaattctggagctgaaaaatgcaattggcatactgaagaatgcatcagagtctyttaacagcagaattgatcaaacagaaraaagaattagtgagcttgaagacaggctatttgaaaatacacagtcagaggagacaaaagaaaaaagaataaaaaacaatgaagcatgcctacaagatctagaaaatagcctcaaaagggcaaatctaagagttattggccttaaagaggaggtagaaagagagataggggtagaaagyttakttcaarggataataacagagaacttcccaaacctasagaaagatatcaatattcaagtacaagaaggttatagaacaccaagcagatttaacccaaagaagactacctcaaggcatttaataatcaaactcccaaaggtcaaggataaagaaaggatcctaaaagcagcaagagaaaagaaataacatgcaatasagctccaatacgtntggcagcagacttttcagtggaaaccttacaggccaggagagagtggcatgacatatttaaagtgctgaaggaaaaaacttttaccctagaatagtatatccagtgaaaatatccttcaaacatgaaagagaaataaagactttcccagacaaacaaaagctgagggatttcatcaacaccagacctgtcctgcaagaaatgctaaagggagttcttcaatctgaaagaaaaggacgttaatgagcaataagaaatcatctgaaggtacaaaactcactggtaatagtaagtacacagaaaaacacagaatatcgtaacactgtaattgtggtatgtaaactactcatatcttaartagaaagactaaaaaatgaaycaatcaaaaataataactacaacaattttcaagacatagacagtacartaagatataaatagaaacaacaaaaagttaaaaagagaggggatgaagttaaagtgtagagtttttattagttttcgattgtttgcttgtttgtttatgcaawcggtgttgttatcagcttaaaataatgggttataagataktatttgcaagcctcatggtaacctcaaatcaaaaaacatacaacagatacacaaaaaataaaaagcaagaaattaaatcataccaccagagaaaatcaccttcactaaaagaaagacaggaaggaaggaaagaaggaagagaagaccacaaaacaaccagaaaacaaataacaaaatggcaggagtaaatccttacttatcaataataacattggaatgtaaatggactaaactctaatcaaaagacatagagtggctgaatggataaaaaaaacaakacccaatgatctgytgcctacaagaaacacacttcacctataaagacacacatagactgaaaataaagggatggaaaaagatrttccatgcaaatagaaaccaaaaaagagcaggagtagctatacttatatcagacaaaatagayttyaagacaaaaactataagaagagacaaagaatgtcatttaatgataaaggggtcaattcagcaagaggatataacaattttatatatatgcacccaacactggagcacccagatatataaagcaaatattattagagctaagagagagatagaccccaatacaataatagctggagacttcwmcacctgtcttttagcattagaaawatcwtccagacagaaaatcaacaaagaaacattgkacttaatctgcactatagaccaaatgracctaatagayatttacagaacatttyatccaacagctgcagaatacacattcttctcctcagcacatgratcattctcaaggatagrccatatntnaggtcacaaaacaartcttaaaacattcaaaaaattgaaattatatcaagyatcttctctgaccacaatggaataaaactagaaatcaataacaagagraattttggaaactatacaaacacacggaaattaaacaayatgctyctgaatgaccagtgkgtcaatgaagaaattaagaaggaaattkaaaaatttcttgaaacaaatgataatggaaacacaatataycaaaacctatgagatacggtaaaagcagtactaagagggaaagtttatagctgtaagtgcctacatcaaaaaagaagaaaaacttcgaataaacaacctaatgatgcatcttaaagaactagaaaagcaagagcaaaccaaacccaaaattagtagaagaaaataaataataaagatcagagcagaaataaatgaaattgaaataaagaraacaatacaaaagatmaatgaaacaaaaagttggttttttgaaaagataaacaaaattgacaaacctttagccagaytaagaaaaaaagagaagacccaaataaataaaatcagagatgaaaaaggagacattacaactgataccacagaaattcaaatgatcattagaggctactrtgagcaactatataccaataaatcggaaaacctagaagaaatggataaattcctagacacatacaacctacyaagattgaaccatgaagaaatccaaaacctgaacagaccaataacaagtaacgagatcgaagccgtaataaaaagtctcccagcaaagaaaagcccgggacctgatggcttcactgctgaattttaccaaacatttaaagaattaataccaatcctactcaaactattctgaaaaaagaggaggaaggaatacttycaaactcattctatgaggccagtatyaccctgataccaaaaccagacaaagacacatcaraaaaawaaaactacaggccaatattcctgatgaatattgatgcaaaaatcctyaacaaaatactagcaaaccaaattcaacaacacattaaaaaratcattcatcatgaccaagtgggatttatcccagggatgcaaggatggttcaacatatgcaaatcaatcacaatcgatrtgatacatcatatcaacagaatgaaggacaaaaaccatatgatyatttcaattgatgctgaaaaagcatttgataaaattcaacatcccttcatgataaaaaccctcaaaaactgggtatagaagaacatayctcacgacacaataaaagccatatacgacagacycacagctagtatcayactgaatggggaaaaactgaaagcctttccyttawgatctgraacatgacaaggatgcccactttcaccactgttattcaacatagtactggaagtcctagttagagcaatcagacaagagaaagaaataaagggcatccaaattggaaaggaagaagtcaaattatccttgtttgcagatgatatgatcttatatttggaaaaacctaaagactccaccaaaaaactattagaactgataaacaaattcagtaaagttgcaggatacaaaattaacatacaaaaatcagtagcatttctatatgccaacagtgaacaatctgaaaaagaaatcaagaaagtaatcccatttacaatagctacaaataaaattaaatacctaggaattaatktaayaaaawaaktgaaagatstctayaatgaaaactataaaacactgatgyaagaaattgaagaggacacaaaaaaatggaaagatattccatgtttatggattggaagaatcaatattgttaaaatgyccatactacccaaagcaatctacagattcaatgcmatccctatcaaaatacyaatgacatttttcacagaaatagaaaaaacaatcctaaaatttatatggaaccacaaaagacccagaatagccaaagctatcctaagcaaaaagaacaaaactggaggaatyacattacctgacttcaaattatactacagagmtatagtaaccaaaacggcatggtactggcataaaaacagacacatagaccaatggaacagaatagagaacccagaaacaaatccatacatytacagcgaactcattttcgacaaaggtgccaagaacatacactgaggaaaagacartctcttcaataaatggtgctgggaaaactggatatccatatgcagaagaatgaaactagaccccatctctcgccatatacaaaaatcaaatcaaaatrgattaaagacttaaatmtaagacctcaaactatgaaactactaaaagaaaacattggggaaactctccaggacattggatttgggcaaagatttcttgagtaataccccacaagcacaggcaaccaaagcaaaaatggacaaatgggatcayatcaagttaaaaagcttctgcacagcaaaggaaacaatcaacaaagtgaagagacaatycacagaatgggagaaaatatttgcaaactacccatctgacaagggattaataaccagaatatataaggagctcaaacaactctataggaaaaaaatctaataatctgatttaaaaatgggcaaaagatctgaatagacatttctcaaaagaagacatacaaatggcaaacaggtatatgaaaaggtgctcaacataaytgatcatcagagaaatgcaaatcaaaactacaatgagatatyatctcactccagttaaaatggcttttatccaaaagacaggcaataacaaatgctggygaggatgtggagaaaagggaaccctcgtacattgttggtgggaatgtaaattagtacaaccactatggagaacagtttggaggttcctcaaaaaactaaaaatagagctaccatataatccagcaatcccactgctaggtatataccccaaagaaaggaaatcagtatattgaagagatatctgcactcccatgtttattgcagcaytgttcacaatagccaagatttggaagcaacctaagtgtccatcaacagatgaatggataaagaaaatrtggtacatatacacaatggagtactattcagccataaaaaagaatgagatcctgtcatttgcaacaacatggatggaactggaggtcattatgttaagtgaaataagccaggcacagaaagacaaacatcgcatgttctcacttatttgtgagakctaaaaattaaaacaattgaactcatggaaayagagagtagaaggatggttaccagaggctgggaagggtagtgggaggkngkgggaagtggggatggttaatgggtacaaaaatatagttagatagaatgaataagayctagtatttgvtagcacaacagggtgactacagtcaaaaataatttattgtayatttwraaataactaaaagagtataattggattgtttgtaacacaaaggataaatgcttgagatgatggataccccatttaccctgacgtgattattatgcattgtatgcctgtatcaaaatatctcatgtaccccataaatatatacayctattatgtacccayaaaaat

SEQ ID NO: 349 - DNA, 912 bp, Homo sapiens
  repeat_region (1)..(912): l1pa11
ctaatatccagaatstacaargaacttaaacaaatttacaagaaaaaaacaaamaaccccatcaaaaagtgggcaaaggacatgaacagacacttctcaaaagaagacatwtatgtggccaataagcacatgaaaaaaagctcaacatcactgatcattagagaaatgcaaatcaaaaccacaatgagataccatctcayrccagtcagaatggcaattattaaaaagtcaagaaacaacagatgctggygaggctgtggagaaataggaatgcttttacactgttggtgggaatgtaaattagttcaaccattgtggaagacagtgtggcgattcctcaaggatctagaaccagaaataccatttgacccagcaatcccattactgrgtatatacccaaaggaatataaatcattctattataaagacacatgcaygtgtatgttyattgcagcactattcacaatagcaaagacatggaatcaaccyaaatgcccatcaatgatagactggataaagaaaatgtggtacatatacaccatggaatactatgcagccataaaaaagaatgagatcatgtcctttgcaggaacatggatggagctggaggccattatccttagcaaactaaygcaggaacagaaaaccaaataccgcatgttctcacttataagtgggagctaaacgatgagaacacatggacacatggaggggaacaacacacactggggcctgtcggagggtggagggtgggaggagggagagcatcaggaaaaatagctaatggatactgggcttaatacctgggtgatgggatgatctgtgcagcaaaccaccatggcacacgtttacctatgtaacaaacctgcacatcctgcacatgtaccccggaacttaaaataaaagttgaaa

SEQ ID NO: 350 - DNA, 3075 bp, Homo sapiens
  repeat_region (1)..(3075): l1pa12_5
  misc_feature (70)..(70): n is a, c, g or t
  misc_feature (70)..(70): n is a, c, g or t
  misc_feature (982)..(982): n is a, c, g or t
  misc_feature (1387)..(1387): n is a, c, g or t
  misc_feature (1380)..(1380): n is a, c, g or t
  misc_feature (1123)..(1123): n is a, c, g or t
  misc_feature (1256)..(1256): n is a, c, g or t
  misc_feature (1322)..(1322): n is a, c, g or t
  misc_feature (1329)..(1329): n is a, c, g or t
  misc_feature (1353)..(1353): n is a, c, g or t
  misc_feature (1450)..(1450): n is a, c, g or t
  misc_feature (1505)..(1505): n is a, c, g or t
  misc_feature (1517)..(1518): n is a, c, g or t
  misc_feature (1659)..(1659): n is a, c, g or t
  misc_feature (1851)..(1851): n is a, c, g or t
  misc_feature (2093)..(2093): n is a, c, g or t
  misc_feature (2103)..(2103): n is a, c, g or t
  misc_feature (2140)..(2140): n is a, c, g or t
  misc_feature (2149)..(2149): n is a, c, g or t
  misc_feature (2179)..(2179): n is a, c, g or t
  misc_feature (2189)..(2189): n is a, c, g or t
  misc_feature (2245)..(2246): n is a, c, g or t
  misc_feature (2248)..(2248): n is a, c, g or t
  misc_feature (2254)..(2254): n is a, c, g or t
  misc_feature (2438)..(2438): n is a, c, g or t
  misc_feature (2446)..(2446): n is a, c, g or t
  misc_feature (2521)..(2521): n is a, c, g or t
  misc_feature (2113)..(2113): n is a, c, g or t
ggaggtggccaagatggccgactagaagcagctagtgtgtgccgctctcatggagagaaatggaaggggngagtaaatacagcaccttcaactgaaacatccaggtacacgcattgggactaatcaagaaaacaacttgacccatggagaacggagaaaagcaaggcaggacgacggcccacccgggagcgacacggagccaggggagcctcccccgcccagggaagtggtgagtgaatgtgcggccccgggaacccacgcttctcccacggatctttgcaaccctcaggtcaggagatcccctcgtgaacccactccaccagggccttcagtctgacacacagagctatgtggagtctcggcagagcagccgctcaggcatgcgtggagaccctggagccttagatacccgggcttcccggcaaaagtagctgcaactccagcaaagcgggaggttagacccccatacatacccctaggaaagaggctgaatccagggggccgagcagtgayagtctgcaggccccacttccacrgcacctcacaggataagacccactgacttggaatttcagcyagccacyggtagcagcgttgcacctmcctgraacrgagctcccagggggaaggggcgggctgccatctttgctgtttgggcgacttagccattccagccttcgggctttggagagtccaagccaactaggggcagaagsgatcccccagcacagmmcagcwgctctaccaaaacrtggccagactgcttctttaagtgggtccccgatcctattcctcctcgctgggcgggacctcccaaccggggcctccagccacccccgctggtgttytctagccgacagagatttgtaattctccctgggacggagttcccagagggaagggcgggccaccatctttgctgtttgrgcggctcagccgttccaaccttcgggctttggagagcccaagctgaccgggggcngaaggaatcccccagcacagcacagctgctctaccaaaamgcggccagactgcttctttaakcgagtccccgatcccatttctcctcactgggcgggacctcccaaaccgggtctccagccacctcctgcakgtgttctcnggctaacagagatttgaaccyccctgggacgragctyycagagggaggggcaggcygccatctttgctgtttsrkarmcttmrctgttsawaccttcaggcwytggaraattyaaggcgacyagggkctrgancggacccccagcacagyacagcwgcyctaysraaawgtggccagactttttkttaagtaggtcccnaatcccntwtctcctcactgggtgggacctnccaaccagggtctccagccacctcctncaggtgnttttgggctggcaacaggtccgtacctccctgggacgaagctcccagaggcaggggcaggctnccatcttcgctgtttcgtagccttcactggtgatacctccaggtactagaaaatncgaggtgactanngactggagcgggcccccagcatattrcagcagccctacggaaaagtggccagactgttatgtgggtscctawtcccatatctcctcactgggcgggtcctccaggcctgggtctccagccaccacyyaccggggctgtcgngccagtaccarctcwgcaactccctggacagagccyccaggggaaactgaaagcctctctgccactgcctctgcagtggaactgcccttgctaccctcagactaacgaaggagsaaagaccctaagtgccttatccacacctccaacaagctgcagtcgacccaaggagaggaggccagtctgtctcycacnggtcccacmcaccccccacwgcttgtcaccasrcaggraacccctggcttgggcccacagcacagaccctccatcctgggctgactgcactgagcgattgctgacctgcatctctctggggtggagcccccaggagacaagcaaaagaccctcggccacaaccactactaaggtcccttcctccgckgcctccaagttggggagaaaacataaaccctgagatcaccccagagctgttatgngcagcccggnagtgccaagntacgatctacagccagcactcaagtgngagaggagnccacactttcatagcattgagagggaacanggctgcaaangtgaggaaatacaggggagccacacgactgagcaagagcctaccaactgaccactnnanctaagngtcacctactggatcacgccctaaagcttcaagaccaaaagtacttcacaaacatagccccctgtgaaacaagagacaggaagtaagcttcaaataaagaccatgcacaaagcctcagcccagtgaaaacatccaaaaaggaagtctattgattgtattcaatgcacactgcagttaaaggaanatccacanacagagatgagaaagaaccaacgcaagaactcgcgtaactcaaatggtcagagtgtcttatgtcctccaaacgantgcatagttttccaacaaaggttcttaactaggctgagttggcatgaatgacagaaatagaattcagaatatggataggaacaaagatcattgagattgaggagaatggcataacccaattcagggaaactaagaatcacaaaatcatgataaaacgatacaggagctgaaggacaaaatagctggtataagaatgaacctaacaaatacatctgatagagatgaaaaacacactacaagaatttcacaatgcaatcacaagtattaatagcagaataaagcaagctgaggaaagaatctcagaaattgacaactggctctctgaaataagacagtcagacaatcacaaagaaacaagaataaaaaggaatgaacaaaacatgcaagaaatatgggattatgtaaagaggccaaatgtatgaacgactggcatcactgaaaggatggaggagaaagcaaacaacttggaaaacgtatttcaggatatcgttcatgaaaacttccgcaaccttgctagaaaggccataagtcaaactcagaaaatatggaaaact

SEQ ID NO: 351 - DNA, 904 bp, Homo sapiens
  repeat_region (1)..(904): L1PA15
ctaatatccagaatstacaargaacttaaacaaatttacaagaaaaaaacaaamaaccccatcaaaaagtgggcaaaggacatgaacagacacttctcaaaagaagacatwtatgtggccaataagcacatgaaaaaaagctcaacatcactgatcattagagaaatgcaaatcaaaaccacaatgagataccatctcayrccagtcagaatggcaattattaaaaagtcaagaaacaacagatgctggygaggctgtggagaaataggaatgcttttacactgttggtgggaatgtaaattagttcaaccattgtggaagacagtgtggcgattcctcaaggatctagaaccagaaataccatttgacccagcaatcccattactgrgtatatacccaaaggaatataaatcattctattataaagacacatgcaygtgtatgttyattgcagcactattcacaatagcaaagacatggaatcaaccyaaatgcccatcaatgatagactggataaagaaaatgtggtacatatacaccatggaatactatgcagccataaaaaagaatgagatcatgtcctttgcaggaacatggatggagctggaggccattatccttagcaaactaaygcaggaacagaaaaccaaataccgcatgttctcacttataagtgggagctaaayattgagtacacatggacataaagaagggaacaacagacactggggcctacttgagggtggagggtgggaagagggagaggatcaaaaaactacctatcgggtactatgcttattacctgggtgatgaaataatctgtacaccaaaccccagcgacacgcaatttacctatataacaaacctgcacatgtaccccctgaatctaaaataaaagttaaaa

SEQ ID NO: 352 - DNA, 1992 bp, Homo sapiens
  repeat_region (1)..(1992): l1pa15_5
  misc_feature (760)..(760): n is a, c, g or t
  misc_feature (1149)..(1149): n is a, c, g or t
  misc_feature (1261)..(1261): n is a, c, g or t
  misc_feature (1418)..(1418): n is a, c, g or t
  misc_feature (1533)..(1533): n is a, c, g or t
  misc_feature (1558)..(1558): n is a, c, g or t
  misc_feature (1802)..(1802): n is a, c, g or t
aagatggctgactagatgcagccaggwggaacakctcccactgagggaccaggacatcaggaagactggcacactcctarcagatcttcagagggaaggcaytgagagtggacggagggaagacacagawgctgggctgaagggggaggaagctgggaaccctgcacggggctaccrmgcaccaggactcgttcctggcccccagtgactcctggggaakgggtgagttgaacaggcaaggagyracccactctcaccatggacctctggaatcctagcagsaggagaccccwcgaccmccayrgacacttgagytggcagggagagctgcttagagaagtggtaggggcagramtccagcctgtgtggagcccagagggtttggtgcaggarcatctgtagtggagcacggccagggaygcccatcccccaaggctcamcatgctcccataggagactttagcccttagggkaactgtyrgacctgaacwctgcagggtrgtcttgcccatgagacrgggccagtctgacctgagcaccccttggtctgctggcctctccyggggccccagcctggccacacctgcttgcagtgcagcctccaggtgcctcctgggggcccacatcatagcttctgcactggcagaccatgcctgaccagcagagagctccagcagggcggcccccatggmcacgcaccagcctgcatgctccctccccacactgcagcttccccatggygctttgcctgcacacattnrcccatggcaactccccacatcactttgctggcacgtgtctgcatrggtggrttttgctttccttgccctgccagygtacatgtgygagtgcaccctgctgtgccactgctgctggygggagtgcaccccccacccattctcccatacctsctgactgccattgcagatggagccttggtgggcacagagccagccagccccacccccaccagyrcccyrcccytgyrctaacactgcccctggagtgaaaccaggcacaagaacagcggatyctccccyaccctgagcgaccactcctgcttgtggggcacagagaaggcacacagacctcacmcagwyctgwgccgaccagcgcttcgccccgtgctaacaccaccwccggtgcaancgcawgcacagwcgccggcgrcggcccctcgccgctctgagccgttctgccwctgctgccgctgtgaatgcscacagggaggcaggcacccccgcacccgctagtacccccnacccccacctaaggcgttgagcgygcaccctgccgtgccgccgctgctgctggcacacgcaagcaagcatagatcctgctgccaccgccccaaaaaagcactttggctggcaccacccatcggagtgttgtggccagtggaccgggaacacctcggncccyccagcgcagcaggttcctaacctcgaggggccagagaacaaagctggggacccgrtaccagccccccagagttagagcacacagcccaggagtgctgagctgagccttggncccctaaaatcttccagaaacgaanccagtcaactgaacccaccttataccacaatcaaacccccaagggcatcaaagaagatraaagaaaaaaaaaycatccaaaggacagcaacttcaaagattgaaggaacatcagcccacamagatgagaaagaaccagtgcaagaactctgrcaactcaaaaagccagartgycttctttcctscaaatgactgcaytasttcyycagcaakggttcktaactaggctgaaatggctgaaatgncagaaatggaattcagaatatggataggaatgaagatcatcaagattcaggagaamgtcgaaacccaatccaaggaakctaaggaatcacaataaaacgatayaggagctgamagacaaaatggccaktwtaraaaagaaccwaactgatytgatagagctgaaaaacwcgctacgagaatttcataata

SEQ ID NO: 353 - DNA, 1884 bp, Homo sapiens
  repeat_region (1)..(1884): l1pa15_5
  misc_feature (60)..(60): n is a, c, g or t
  misc_feature (164)..(164): n is a, c, g or t
  misc_feature (1376)..(1376): n is a, c, g or t
  misc_feature (1381)..(1381): n is a, c, g or t
  misc_feature (1428)..(1428): n is a, c, g or t
  misc_feature (1695)..(1695): n is a, c, g or t
  misc_feature (1729)..(1729): n is a, c, g or t
  misc_feature (1763)..(1763): n is a, c, g or t
tttttttcccaagatggcggattagaggcttttagtatgcctcagccacttggaaatggnaaaatagtgcataaagatcaactctgtgagctttaattcaagaaggaaaatgggaatccaccataatcgtgaaggacaccccagatcctagggaggagaatgtnggcaaacagcccctatgatggcgtccagctgataaaagtgagtgaagccccagtacgcgagagaggcagagagtctccctctgtgactcacttttccactggggatccgagcaacccaggccaagggagaacactttgtttctcccaagccctggagctaacgtggggagaggcttggagatgctgtgagggaaagacaccgggaaaagctgcagacattttcccagacctaggamcaagagcaggatgccatttttaatccgggcgcatacaaagtcagccattctttggcgacccggcagcgtggccgcgcaggcattttagtctcaggccagagattggagcgcctgctctggagtagggtaggggcctccacagccagaactgtgaaaagcgcctcagcagtaggcgctggaattgtgctctcccctactgcaagcctggggcgggaggagagctgctacagctgcagtttctcctgggcggcgagacttgcagccagggccagcttggcgacctggaactggtctgtgtgtgccattgctgggtgccccagcctgctcccctgagatcgtggtgcagsggggccctctctgctccacgcccaggcagatctccaggcattcagagcacccgctcgcctggwtcagcagcctgagccgccccacccttcctgkgcatagatcgtggtgcagsggggccctctctgctccacgcccaggcagatctccaggcattcagagcacccgctcgcctggwtcagcagcctgagccgccccacccttcctgkgcatagatcgtggtgcagsggggccctctctgctccacgcccaggcagatctccaggcattcagagcacccgctcgcctggwtcagcagcctgagccgccccacccttcctgkgcatagatcgtggtgcagsggggccctctctgctccacgcccaggcagatctccaggcatctggagcacccactctcctggattaggagtttaagccgccccacccttcccgtgcagagaacttggggctgaggaggtttccctgctccacgcctaggcacacctctgggcgcttggtggctgcccactggattctcccttggcgctggcgcttgtgcccgccatcgggagatctgtaggcggacctgcctagtccggccccacccatcttggmccccgcccctccagggctgagcagrsagttcagancactntgcattccatgcatcagcccattkcctgaggcaacagagagcttctnccagtaaacaaggatcaaatatatacccagccacactggccgtagctagctcttacctataagcgccatctactggcttgtaggtcaaactgcacwgcccaatataaaacctgctaaaagaagtgcatagggctatagaagcaaagccaaaagaccatacccagcattctctacagtcacaccmcctagggaggaggagaaaggaaagggaaagaaaaaacaccaataatattatagggaaagaaagaaaagaaaaaaccctactcncatggaaataattacaaaaattagaagtgccagnatctccagatgagaaggaaccagcacaagaattntggcaccatgaaaaatctgaatgtagtgacaccaccaaaggatcgcactagctctccagcaatggttcctaatcaaaacggaaactcagaaatgacaggcaaagaattcaaagcatggatt

SEQ ID NO: 354 - DNA, 893 bp, Homo sapiens
  repeat_region (1)..(893): l1pa2
ctaatatccagaatctacaatgaactcaaacaaatttacaagaaaaaaacaaacaaccccatcaaaaagtgggcgaaggacatgaacagacacttctcaaaagaagacatttatgcagccaaaaaacacatgaagaaatgctcatcatcactggccatcagagaaatgcaaatcaaaaccactatgagatatcatctcacaccagttagaatggcaatcattaaaaagtcaggaaacaacaggtgctggagaggatgtggagaaataggaacacttttacactgttggtgggactgtaaactagttcaaccattgtggaagtcagtgtggcgattcctcagggatctagaactagaaataccatttgacccagccatcccattactgggtatatacccaaaggactataaatcatgctgctataaagacacatgcacacgtatgtttattgcggcactattcacaatagcaaagacttggaaccaacccaaatgtccaacaatgatagactggattaagaaaatgtggcacatatacaccatggaatactatgcagccataaaaaatgatgagttcatgtcctttgtagggacatggatgaaattggaaatcatcattctcagtaaactatcgcaagaacaaaaaaccaaacaccgcatattctcactcataggtgggaattgaacaatgagatcacatggacacaggaaggggaatatcacactctggggactgtggtggggtggggggaggggggagggatagcattgggagatatacctaatgctagatgacgagttagtgggtgcagcgcaccagcatggcacatgtatacatatgtaactaacctgcacaatgtgcacatgtaccctaaaacttaaagtataataaaa

SEQ ID NO: 355 - DNA, 892 bp, Homo sapiens
  repeat_region (1)..(892): l1pa7
ctaatatccagaatctacaaggaacttaaacaaatttacaagaaaaaaacaaacaaccccatcaaaaagtgggcaaaggatatgaacagacacttctcaaaagaagacatttatgyagccaacaaacayatgaaaaaaagctcatcatcactggtcattagagaaatgcaaatcaaaaccacaatgagataccatctcaygccagttagaatggcgatcattaaaaagtcaggaaacaacagatgctggagaggatgtggagaaataggaatgcttttacactgttggtgggagtgtaaattagttcaaccattgtggaagacagtgtggcgattcctcaaggatctagaaccagaaataccatttgacccagcaatcccattactgggtatatacccaaaggattataaatcattctrctataaagacacatgcacacgtatgtttattgcagcactattcacaatagcaaagacttggaaccaacccaaatgcccatcaatgatagactggataaagaaaatgtggcacatatacaccatggaatactatgcagccataaaaaaggatgagttcatgtcctttgcagggacatggatgaagctggaaaccatcattctcagcaaactaacacaggaacagaaaaccaaacaccgcatgttctcactcataagtgggagttgaacaatgagaacacatggacacagggaggggaacatcacacaccggggcctgtcggggggtggggggctaggggagggatagcattaggagaaatacctaatgtagatgacgggttgatgggtgcagcaaaccaccatggcacatgtatacctatgtaacaaacctgcacgttctgcacatgtatcccagaacttaaagtataataata

SEQ ID NO: 356 - DNA, 606 bp, Homo sapiens
  repeat_region (1)..(606): l1paxx_5
  misc_feature (523)..(523): n is a, c, g or t
ggggtggggccaagatggctgactagaagcagcwgcgatcggaggctcccatggaaaagaaccaaaacagtgtgtaaatcctgcaccagcaactgaggtatccaggttctctcatcaggactgactaggcagctggcatgacccatggagaggaaggaagagcagtgtggtgtggcggcccacctgagagccacacggggcaggggagcccccaccccccagccaagggaggcagtgagtgagcatgctacccagcctgggaaaccgtgctttttccacggaactgtgcaacccatggatcrgaagatcccactcrtgaacccacrccaccagggcctagsgtcccaaccccggagctgtgcagattctcaacagcctctcagctggaatctgcttaagcctaccgagctcccggggggaggggcgaccagcaccacagctgcagctgcctgctgtctaagccatttgagctccttgggggaggggcagcagccagcactgggactcacaactgcctaacacnctaagctccctgggcaggggaagggcagcatccatctctatagctccaggctgtgcttttcccctgctggagccagggaggct

SEQ ID NO: 357 - DNA, 902 bp, Homo sapiens
  repeat_region (1)..(902): l1pb1
ctaatatccagaatctataaggaactcaaacaaatcagcaagaaaaaaacaaacaatcccatcaaaaagtgggctaaggacatgaayagacamttctcaaaagaagatatryaaatggccaacaagcatatgaaaaaatgctcaacatcactaattatcagggaaatgcaaatcaaaaccacaatgcrataccatcttactcctgcaagaatggccataattaaaaaatcaaaaaataatagatgttggcgtggatgtggtgaaaagggaacacttytacactgctggtgggaatgtaaactagtacaaccactatggaaaacagtatggagattycttaaagaactaaaagtagaactaccatttgatccagcaatcccactactgggtatctacccarargaaaakaagtcattataygaaaaagayacttgcacacrcatgtttatagcagcacaattyrcaattgcaaaaatatggaaccaacccaaatgcccatcaatcaayragtggataaagaaaatgtgrtatatatataccatggaatactackcagccataaaaaagaatgaaataatggcatttgcagcaacctggatggarytggagacyattattctaagtgaagtaactcaggaatggaaaaccaaacatyrtatgttctcacttataagtgggagctaagctatgaggatgcaaaggcgtaagaatgatacaatggactttggggactcgggagatcgggrgaaagggtgggaggggggtgagggataaaagactacaaattgggtacagtgtacactgctcgggtgatgggtgcaccaaaatctcacaaatcaccactaaagaacttattcatgtaaccaaacaccacctgttccccaaaaacctattgaaataaa

SEQ ID NO: 358 - DNA, 897 bp, Homo sapiens
  repeat_region (1)..(897): l1pb3
ctaatatccagaatctataaggaactcaaacaaatcagcaagaaaaaaacaaacaatcccatcaaaaagtgggctaaggacatgaayagacamttctcaaaagaagatatryaaatggccaacaagcatatgaaaaaatgctcaacatcactaattatcagggaaatgcaaatcaaaaccacaatgcrataccatcttactcctgcaagaatggccataattaaaaaatcaaaaaataatagatgttggcgtggatgtggtgaaaagggaacacttytacactgctggtgggaatgtaaactagtacaaccactatggaaaacagtatggagattycttaaagaactaaaagtagaactaccatttgatccagcaatcccactactgggtatctacccarargaaaakaagtcattataygaaaaagayacttgcacacrcatgtttatagcagcacaattyrcaattgcaaaaatatggaaccaacccaaatgcccatcaatcaayragtggataaagaaaatgtgrtatatatataccatggaatactackcagccataaaaaagaatgaaataatggcatttgcagcaacctggatggarytggagacyattattctaagtgaagtaactcaggaatggaaaaccaaacatyrtatgttctcacttataagtgggagctaagctatgggtatatacgggcatatagagtggtataatagacaytggagactcaaaaggtggagggtaggagaggggtgagggatgaaaaattacctattgggtacaatgtwcactattcgggtgatgggtacactaaaagcccagacttcaccactayacaatatatccatgtaacaaaaakgcacytgtaccccctaaatytataaaaataaa

SEQ ID NO: 359 - DNA, 2247 bp, Homo sapiens
  repeat_region (1)..(2247): l1pba_5
  misc_feature (6)..(6): n is a, c, g or t
  misc_feature (764)..(764): n is a, c, g or t
  misc_feature (1819)..(1819): n is a, c, g or t
  misc_feature (1835)..(1835): n is a, c, g or t
  misc_feature (1839)..(1839): n is a, c, g or t
  misc_feature (1880)..(1880): n is a, c, g or t
  misc_feature (1972)..(1973): n is a, c, g or t
  misc_feature (2136)..(2136): n is a, c, g or t
  misc_feature (2173)..(2173): n is a, c, g or t
acaaantagggaaaaatggcggataggaggcaggactaaattgcagctcccactcggatggacagagcagcatgtggagactcacatcgtgaacttttgctccaagaaccaccgcaggaatataycaagaaagccgagagaatycacagaccctctgaaggaagcagattgctcctgcargayccaggaaacggcccaaaaactgtgagtgcccaaagtgtgagaagggraaaatctgcccccgaacacacatcctyactggggaacctgaagatccagatcacaggagaaggatttgaccttacctggagctgagacaatttagagggccgagcaaaatacaggggtagaggaagcagtgggaaaagccctgtgggctctccgggtccccagggaagccatttctgactttgtctcacaggggtccctggggagggctgccagwggaactggggaaaggccacagggagaaggaaacctccagctgaactttgtaacaattccgaccgaacgcgaagtttcctggccagaactcaggggagggcgtgaatccggwgtgcagactcagcacagaagccgtggcaggcaggaggcgcgaagcctgaaagccctgcttgctttctcagcwgggaggctggtagcctggggcaagttctcagccctgctcaccaactgcctggaaataaactcggtgctgttgtgggggggcacggtgggagtgagaccggccttttkggttgcatgggagctgggtgaggcctgtnactgccagctttcccccacttccctggcgacctgcatgacacagcagaggcagccataatccccctgggaacgtaactccattggcctgggaactacacccccatccctcacagtagccgcagcaagccccgcccaaggagactctgagctcagacatgcctaaccctgcccccacctgatggtctttctctacccaccctggtagccgaagacaaaagacataawctcttgggagctctayggccccacccatcgcctgagaaacwgaaatayttaycywggcmamcttagggcaagcttrtatccwccctatactrtcgcagctgatgccctcttgaaagcgccacctcttggctggaggccaaccaactcaagacattacagcaaytcayracagaataaccctgcccctarrraaggagaaaacgacagctatcaccactgcctgcaacatcctggctaaccagaggtcctgagtctgtccacgtgayaasttcactrctakyataaccagcattcgagaaarccagcacactaagtctatctacaaccaaggaatctcacagagtctayttcactcccctgccacctccatcagagctggtgctggtattcaccgctgrgagacttgaagacaggtcacatcacwggatycyttgcagacattccccagyaccagcccggagtctggtagctccactgggtggctagayccagaagagcaataacgatcactgyagtccggctctcaggaagtcccattcctaggrgaagggggagagcaccacatcaagggaacaccctgtgggacaaaagaatctgaacggcagsccttgagtcccagatcttycctctgacatagcctacccaaatgagaaggaaccagaaaaayaattctggtaatatgacaaaacaaggttctttaacacccccaaaaratcacactagctcaccagcaatggatccaaaccaagaagaaatcyctgaattgccagaaaaagaattcagaaggtcgattattaagctactcaaggaggcaccgaggaaggtgaanaccaacttaaagaaanttanaatataatacaggatatgaatgraraaatctycagwgaaanagatagcataaakaaaaaacaatcamaacttcwggaaatcgaagyacacttatagaaatgcgaaatgcwctggaaagtctcarcaatagaatngaacaagcagaagaaagaacttcagagctcgaagacaaggytttcaaattaacccaatccgacaaagacaaagaaaaaagaataagaaaatatgaacaaagcctccaagaagtctgggattatgttaaacgaccaaacctaagaataatcggcgttcctgagnaagaagagaaatctaaaagtttggaaaacttattcgnggaaataatcgaggaaaacttccccgrcsttgctaragayctagayatccaamtacaaagaagctcwawraaca

SEQ ID NO: 360 - DNA, 945 bp, Homo sapiens
  repeat_region (1)..(945): l1pbb_5
  misc_feature (227)..(227): n is a, c, g or t
kggtgggaagtttctttcagcagaggcacagktgcagtgctgggctcagtggggaaagtctgcgcctctaccccaacagtcaggcagccctggtgmttgtgaagggtcttggagaagggattccttctccccctcacccaccactgcagacacagctggggcttctcccacaggaackcagcatgggtgcacctatagacagcctttctggaacaattcagggtgantgcatccccacaggaggagcgccctccaggttcaggcttgcacgagaggcagagtcacaattcctctctacttggaacatcaacattcctgcagatgaaaagaggtgcctgtctgatctgaatagctggaacactgggacaggagtgwggctgkgaggtggatmgctttcctgctggcctggcaggggagctgaggtggctcccacccttcmccctgaaaaaacctcagcgcatctmactgagagctcccccagccaccyccgtcaaggctgggacctctgcccaccattgggtattaaatctacccacctgctttagccacarctggtkyytacccakggayacctcccttactggcctgaagcctgaaccgtcaacccagtaaataaaatactggggaaaaattaaataaataaataaataaagtgcacaccactggggaacgagataagcttcaagagacctctgccattccaaccccacaggagacagtgaacycgctcacacaccaagcacattactactacaaccagcatctgagaaagccakcacacaaagactctctataaccaaggaactcatacagagtcttcacccctgaaagcacccagaaccaaattaggctacaataaactatawwcattaaagtcacatcctcaaggggaaaaaaaattaaaaagcacagtccaatcaaaaataaattcaaaaataattwgaa

SEQ ID NO: 361 - DNA, 527 bp, Homo sapiens
  repeat_region (1)..(527): l3
  misc_feature (498)..(498): n is a, c, g or t
attatattcagttctgggtatcacattttaagagagacattgacaaactggaacatgtccagagaagagtgaccagaatggtaaagggtctgaaaaccatgtcatatgagaaatagttgaaggaactggggatatttagcctggaaaagagaataggggagacttagagggagacatgatagctgtcttcaaatatttgaagggctgtcatatggaagaggaattagacttattcttgtgcagctccagaggacagaacaaggaccaatgggtggaagttacagggaggcagatttcagctcaatataaggaagaactttctaacagtcagagctgtccaaaaatggaatgggctgccttgggaggtagtgagctccctgtcactggaggtattcaagcagaggctggatgaccacttggcagggatgttgtaaaagggatttctgcattggatgggggattggactagatgacctttaaaggtctcttccaactctntgagattctatgattctatctttcaggga

SEQ ID NO: 362 - DNA, 2750 bp, Homo sapiens
  repeat_region (1)..(2750): line2
  misc_feature (17)..(17): n is a, c, g or t
  misc_feature (89)..(89): n is a, c, g or t
  misc_feature (116)..(116): n is a, c, g or t
  misc_feature (433)..(433): n is a, c, g or t
  misc_feature (500)..(500): n is a, c, g or t
  misc_feature (548)..(548): n is a, c, g or t
  misc_feature (578)..(578): n is a, c, g or t
  misc_feature (604)..(604): n is a, c, g or t
  misc_feature (709)..(709): n is a, c, g or t
  misc_feature (772)..(772): n is a, c, g or t
  misc_feature (797)..(797): n is a, c, g or t
  misc_feature (1117)..(1118): n is a, c, g or t
  misc_feature (2099)..(2099): n is a, c, g or t
ctgtcattcattaccgntccttgttgcagtcatccatcgagcccggctcggtcactccctctcatttctcgaagaktttrtctcctagntcaactgtcactctctcataataatantcctgtcataattcttggtgatttcaatatccacatagacgatccatccaatactctggcctctcagttccttgacctcctctctcccgtggtcttgttctcctctacccactctcagccactcactcccatggtcataccctagatcttgtcattactaataactgcaactcctccataatctcaatttcaagcatccyactcttttaccacyacctcctatctttctagctcactctctctggtgccctaactccaataatyctttgaccccaccgagacctmcaatccattgatctcatatgcttttcactgtnccgtgtcctcttccctcctttcwttgctcagattccatggtcaatcattataatcactcccwtacanataccctcaactcccttgcccctytctcmctttgtcttacttrcttgncaaaaccacaaccctggttaaatccaactntccgactaatttrcgcctgcacccgngcagctaaacatggctgragaaaaatacacaaccatgctgactggtctcactttaaatttatgaccacgaacctcaagtgrgcccttaatgctgccaggcaattntactacatttccctagtccattcactctcccactctcctagatgactatttyatactttcttnyttctcaaacctccaacayyyyytnccatctttactctcagctgatgaccttgcttcctatttcactgagaaaatagaagcaatcagaagagaatttccacatgctcccaccaccacatctacccacctacctgcatctgtacccatatactctgccttccctcctgttaccgtggatgaactgtccgtgctcctatctaargccaacccctccacttgtgcactagatcccatcccctcttgcctactcaaggacgttgctccagcaattctcccctctctctcctgcatcatcaatttttccctctctactggatcattcccatcagcatataaacatgctgnnatttctcccatctttaaaaaacaaaaattctccctcgaccccacttccccctccagctaccgccctatttctctgctcccctttacagcaaaacttctcagaagagttgtctatactcgttgtctccacttcctcacctcccgttctctcttaaacccactccaatcaggctttcgtccctaccactccactgaaactgctcttgtcaaggtcaccaatgacctccacgttgccaaatccagtggtcagttctcagtcttcatcttacttgacctctcagcagcatttgacacagttgatcactccctccttcttgaaacactttcttcacttggcttccaggacaccacactctcttggttttcctcctacctcactggccgttccttctcagtctcctttgctggytcctcctcatctccccgatctctaaatattggagtgccccagggctcagtccttggacctcttctcttctctatctacactcactccctgggtgatctcatccagtcycatggctttaaataccatctatacgctgatgactcccaaatttatatctccagcccagacctctcccctgaaytccagactcctatatccaactgcctactcgacatttccatttggatgtctaacagrcatctcaaayttaacatgtccaaaactgaactcctgattttcccccccaaacctgctyctcccgcagtcttycccatctcagttaatggcaactccatccttccagttgctcargccaaaaaccttggagtcatccttgattcctctctttctctcacaccccacatccaatcyatcagcaaatcctgttggctctaccttcaaaatatatccagaatccgaccacttctcaccatctccactgcyaccaccctggtccaagccaccatcatctctcacctggactactgcaatagcctcctaactggtctccctgctyccacccttgcccccctncagtctgttctcagcacagcagccagaatgatccttttaaaatgtaaatcagatcatgtcactccyctgctcaaaacccttcaatggcttcccgtttcactcagagtaaaakccaaagtccttaccgtggcctacaaggccctatatgatctggcccccgcytayctctctaacctcatcttctaccactttccccctcgctcactctgctccagccacactggcctccttgctgttcctcgaacacgccargcwcgttcctgcctcagggcctttgcacttgctgttccctctgcctggaacgctcttcccccagatatccacgtggctcactccytcacctcmttcaggtctctgctcagatgtcacctyctcagagaggccttccctgaccaccctatctaaaatagcacacccyctcccccatcatgcccatytttcttaccycgctttatttttctycatagcacttatcaccatctgacayactatatwatttayttgtttgtttgtttrttgtctcctccacyagaatgtaagctccatgagggcagggattttgtctgttttgttcactgctgtatccccagcgcctagaacagtgcctggcacatagtaggcgctcaataaatatttgttgaatgaatgaat

SEQ ID NO: 363 - DNA, 419 bp, Homo sapiens
  repeat_region (1)..(419): line2b
  misc_feature (132)..(132): n is a, c, g or t
  misc_feature (279)..(279): n is a, c, g or t
  misc_feature (283)..(283): n is a, c, g or t
tcccccttgctcactctgctccagccacactggcctccttgctgttcctcaaacacgccaggctctttcccgcctctgggcctttgcacatgctgttcyctctgcctggaacgcccttccccwctccttcancctggccaactcctactcgtccttcaggkctcagctcaratgtcacctcctccaggaagccttccctgacttcccaggccgagttaggtgccctcctctgggcccccccggtcctaccctgccactctgggttatmattgtctgtkngcangtctgtctcccccactggactgtgagctccgcgagggcagggactgtgtctgtcttgttcaccactgtatccccagcgcctagcacagtgcctggcacatagcaggcgctcagtaaatgtttgttgaatgaatgaa

SEQ ID NO: 364 - DNA, 1460 bp, Homo sapiens
  repeat_region (1)..(1460): looper
  misc_feature (25)..(25): n is a, c, g or t
  misc_feature (27)..(31): n is a, c, g or t
  misc_feature (80)..(80): n is a, c, g or t
  misc_feature (82)..(82): n is a, c, g or t
  misc_feature (109)..(109): n is a, c, g or t
  misc_feature (113)..(113): n is a, c, g or t
  misc_feature (123)..(123): n is a, c, g or t
  misc_feature (128)..(128): n is a, c, g or t
  misc_feature (130)..(131): n is a, c, g or t
  misc_feature (136)..(136): n is a, c, g or t
  misc_feature (140)..(140): n is a, c, g or t
  misc_feature (145)..(146): n is a, c, g or t
  misc_feature (151)..(152): n is a, c, g or t
  misc_feature (158)..(158): n is a, c, g or t
  misc_feature (164)..(164): n is a, c, g or t
  misc_feature (169)..(169): n is a, c, g or t
  misc_feature (200)..(200): n is a, c, g or t
  misc_feature (247)..(247): n is a, c, g or t
ccttyagaayaycatcaggtcttgnannnnnttttatttttgagtttttahttgtaactatttdtaaggatattttatgncntttattctttcaaagaacwrargaaanatgnctgaataaanctcantnnagctngtanttaannatagnntgaganatcttnatgancctattttttccattttgctatttyatcttnctaggaattatttcatcattactaatcaattatttctaactgtgctnwtataaaaagactaaaataataagaaaatggaagaatgataaaacctcctgggatgaaataaataaatcatcactatgacatcatccttcagttttcttactgtgttgcccaaagtattgcattatctttcaagaaggtataaaagaagtctggagacaccatctttgtagtctttttttagctttcattgaacacagtcgagaattcagaatttttcattttctacccataatggcaaagagaaaaaaattgacagaggaagacatttcacaattattagatgaatcagaagatgaatgcaaagagacagatagcagcactctagactctaatgatgatggtgaaattgatcatataagtgaaatctcagactatgagtcttcagatgacgatatcctagatgaattttctcaaactcaagaatcgacgagtgaacaatatatttctaaggacaaaaaggaaatatggtattctcatccagttagtcattcaacaggaaggacttcatcacgcaatattttgcgacaagaacctggaccatcccattttgctaaaaggacatgtgacagtattctttcatcttttatgatgtttgtgcaccaaatttacttgatacagtttgtaagtggacaaatgctaaaggcaggtatgtttacaaaaggtaactggaaggaaatagatgaagagaaaaaaaaaatcattgaattgatcattctaattggtgtttataaatctaaaaatgaaaatgttttgcagttatggagcaaagaagatgtctctcttcaacaaaattatgagccctcaaaattttcaaaagtattacgttttgacgatgtaagtatggaagaaaagaccagaaataataataagctagaacctattagagatgtatttgaaatctggaatcagtatttacaagatagatatgttccaggttcatgcatgacagttgatgagcagttagttgcattcaaaggatattgcccatttcggatatatataccttcaaaaccaggaaaatacggaataaagaatggaattacaattttgggttataattcaaattaaaatttttaatgaagtttttttacaattccttaattcttcttctgtaaattattcgtaaaatgacttaaaaataaaaaaataaaaagagttcattggacccagatggtaaatggtgatgactgtttttccttggtgtaccgaggg

SEQ ID NO: 365 - DNA, 495 bp, Homo sapiens
  repeat_region (1)..(495): lor1
  misc_feature (134)..(134): n is a, c, g or t
  misc_feature (342)..(342): n is a, c, g or t
tgaaaccgrcccaattgtcccatagaactgatgtttatrgtttttttgaataaacatagaaattgaccctcctggtcttaaarcttgaaacttacatttgtyttatctgagttccttcctcaggaaaccaacyntcaggcctcycaaawagtatcaargaactgaaactcaccagatcacyrcatccagacaatgagayrccagacccctcatycatcatgattgcctaactgaccacctgctkcctgttgaccaactcctcttccttacccctccctaattcctgttttcyyacacatagttacatttcttccctgctatataaaccccyaattttagtyngtcagggagatggatttgagactgatctcccatctcctcggctgcagcaccyrawtaaagccttcttccttggcaatamtyrttgtctcagtgattggctttctgtgcagtgagcagcaggacctagacyraacccctggtrtttcagtaaca

SEQ ID NO: 366 - DNA, 491 bp, Homo sapiens
  repeat_region (1)..(491): lorli
gattttggttccctgaccgggaacgcattgctcgtggctcggctgctgtgggccgggagtttcagaagccctcctaagcagctgcccatcccatttttggccggaggtgagtttctgtttctctttggccccgccgctgccagccccaacagtgttcctgattgcctaggaagaacagtctttgaaatttgacatctgcgtctagatggatgagtgtcttttgtgggtaccagacagcgggatctgctcctctcaatttgggaaattctgaaggaatttccgtttgcaggttgaacaagcccaaccgactgagagaggaagcaccccgactgtttcagtttggacactcttggggcttgtttgttgctgcagcagttggattgcgttttggtgattgtgtgcgtgtgtgtgtgtgtgtgtgtcaatatagtcacgggaaattagaatttgataaacggatattcttttataatactgtttggccccactat

SEQ ID NO: 367 - DNA, 498 bp, Homo sapiens
  repeat_region (1)..(498): lsau
cgtcggaaggtgttgggagagcctcagccggaatttcgtggacggacaagggcacagagagcccagcgggctcccttgcatgtcagccggggtgcacaatgagcacaggtctagccaggaggccggcaaagagagctagaggtctgcgttccgccgccaggctctccatggtggcagctgggaggatgcaggggcatgggcgggccggcgacgttgcacggagacgcagaggaggtgagtcactgggggggtgtcaggcctggacgctgtgcgggcccagtgttttcgcgggaagagggtctccacccagcccaggggaggagcgcattttcagggggttggtggtgaggctggggatggtgtgctcaggcaggggtgtgatggaggaaaggcaggagagctctgccctggtgctcccgctgcccaggcggctaacttgcaaacccgcgcatgtgcagaggcagctcacctgtgggtacctgggccggctctgggatc

SEQ ID NO: 368 - DNA, 785 bp, Homo sapiens
  repeat_region (1)..(785): ltrl
  misc_feature (297)..(297): n is a, c, g or t
tgatacggacaggrgrgggaartgctgggtagaggagggcgggktccctggctagggctccaccctcgggcctgtgcccacggacctaggtgaggacaggcatttytgttttcccgcccaaatgttgcatttyccaagaccacccytggcctgccacgccccccatcctgtgcctataaaaacccgagaccytagcrggcasasacacaagcggctggacgtcaagaggaacacaccggcggaagaacacactgacggtggcgccggcaggccatcgactggcggaacsattcgganttcggcaggggcggycggaggacagctggarracagccaggccgctgagcggccggactccaggggaaraycaccttcccactccatcycccttccggctcccccatctgctgagagctacttccactcaataaaaccttgcactcattctccaagcccacgtgtgatccgattcttccggtacatcaaggcaagaaaccccgggatacagaaagccctctgtccttgcgacaaggcagagggtctaactgagctggttaacacaagccgcctatagatggcaaactaaaagagcaccctgtaacacacgcccactggggcttcaggagctgtaaacattcacccctagacactgccgtggggtcggagccccacagcctgcccgtctgtatgctcccctagaggtttgagcagcggggcactgaagaagcgagccacacccccatcgcacgccctgtgagggggacaagggaacctttcccatttca

SEQ ID NO: 369 - DNA, 609 bp, Homo sapiens
  repeat_region (1)..(609): ltr10a
  misc_feature (63)..(63): n is a, c, g or t
  misc_feature (113)..(113): n is a, c, g or t
tgttaagtacggtgagttctgagatcctctccaaagaaccagtatgtcagtatgttcagctcncctgttctttgttctccattttaaagtttaacttcagtatgttcagctcncctgttctttgttctccattttaaagtttaactcaacagttctaatcagtagttaacgcctgttcccctggtcacctgctccatcctgactcatcccgggtcacctgctttgacctgagtcacccttagtcacctgctctgtaaccatccttcccgccaaactactcaccccgccactctggctcatacccctgctctctttaaaatagccaatcggaattagcttagactgtgcggtccaaccctagccaataggggaacgacacagcagtaggggctacctgcatcaggaataagaaccccttcccctcccttgtccaggtgtgctctcgccattgctccatctgcgagacgcacccttctatagaagtaaaattgccttgctgagaaaattaaatttatgtttgagtgctatttcttttgcggcaccgaaacgaaaattaaatttatgtttgagtgctatttcttttgcggcaccgaaactttatttataaca

SEQ ID NO: 370 - DNA, 510 bp, Homo sapiens
  repeat_region (1)..(510): ltr10b
tgttaaatacagtaagaaattcttcttcaaaagtttagcctgcttaagtttccttgtcctttgtttcctgctttcaaggccagacttccttactctctgtgtttcccctaccctggtaaacaaccttcctgccagtccttacccatacagcccacattccacatctgctacccactctgtgatttacctctcccgtcgcaatagcctctcccaccaaaactgatcttcccgccttcccaccagtgcaaccacattcctgcactttgcaagttagccaaccgggttcggattgtgcagtccaactccagccaatggagtcaggacacagtagcagggacaagctgcgttagacataaaaacctctgctttcctttgtttagggtgctctcgtggcaaccagacttaccaggagctctattctgcaaaagtaaatttgccttgctgagagaccctttgtcctttggctcagtgttggttcttctttgcagcaccgagcatttgtttccaaca

SEQ ID NO: 371 - DNA, 586 bp, Homo sapiens
  repeat_region (1)..(586): ltr10c
tgtaaaaagtaaagtagaggttcctcttcaaagactttcctccccatctaattaggaataaatagtaacttctcttaaaagcaaaatttattcaaagacctgtgctaacattcttaaatatctgctagccataataaagaaatcaatgtactttatattcttagctcccacaatttagcctaaatatttgccctggcatgcttatactagtccaagcaagcattaggtcatagcctgttcctcttccttatttgaaggtgtttttacctttctcagcattccacaagttacttcctccttcctttgttctcctctgcctttgcctcttttaaaaagttctaagttgctagccaatcaggacaaatacagaatgtgaggtcctgttccagccaatagaaactggacacagcagtagggtggacgcgtcaggttataaatgaccctgtctcctttgttcagtgtactctcatggcaaaactgctggtgagtgtaccctttctgcagaaagtataaawatggccttgctgagaaaattaaatttatgttcaagtgctatttctttacagcaccacaagcatttcaaaca

SEQ ID NO: 372 - DNA, 513 bp, Homo sapiens
  repeat_region (1)..(513): ltr10d
tgtgggatatgatgaggtttctcttcaaataacctgatcaatcttttattctttaattcatagtacccccctccctycttttttcytttttctccttttttcctttttgcctttgttagatgcccaggcacgccacagtaccaggcgttatcaataccagctcacattcctttccttatttggaaaaaagactaactttctagctcattacagacaccccttcccctttcctctccgctttcttttacgtgcccaccttatctaaaaaaaaatcaaatgtttagccaaccgggattagtttagattgtatgacccaaccccagccaatggggaaagggtacaagggcaggacttgcatcaraaataaaggctctcgtgcccctttgttcaggtgtgctctcatggcgactggccaaggagaagcacccctctgcgcagaagtaaaattgctttgctaagaatcctttgttcgagtgttcaatttccttaggattttgagcgttattcctaaca

SEQ ID NO: 373 - DNA, 684 bp, Homo sapiens
  repeat_region (1)..(684): ltr11
tgtgtttctgcaggatgtacagccctcccagcacggtgctcgcttccctaatgccattccacagtatttgttgcagagaaggaaggcagcatgccaggacagatggagacaggactaatttggcctgaggtatgtaattttgaacttgagcctctctctgggactgtaaaactccaaatcaaagctaatctgagaatacatacatctgaaagatgattaggactgtaaacatctattaatattcaactctgatacaaagtacaagttgtttattcttaccacgcaaggccaaaaaaggggagaaaaaaaaaaaagcacacagcatatgcactggaaagtttcgcttattcaaaacagtatttgtcaagcacctccagtctggtgctgcaggggaaacaaagattaaacagccaggcggacactgctctgcttccaaggtgcttacggtcttaagaaggagacaagacatgtttataaatagccaaaatgcaacccagaaaaggctaaaaaacactgagagggagggagaaataaacgaagcaagaggtctccggaggaagagatgaatgaattagcctattaataactccgtcactgtaatcccaatgtaaagcaagaattccaaaccaggaaaggtcaaactgaagtatttgaggaacacaggcgtcgcctaagcccttcaca

SEQ ID NO: 374 - DNA, 877 bp, Homo sapiens
  repeat_region (1)..(877): ltr12
tgtatctagttaatctggtggggagttggagaatctttatgtctagctaagggattgtaaatacaccaatcagcactctgtatctagctcaaggtttgtaaacacaccaatcagaaccctgtgtctagctcagggtttgtgaatgcaccaatcagcactctgtatctagttaatctggtggggacttggagaatctttatgtctagctaagggattgtgaatgcaccaatcggcactctgtatctagctcaaggttgtaaatggaccaatcagcactctatgtctagctcagtgtttgtaaatacaccaatcgacactctatctagctaatctagtggggacgtggagaacttttgtgtctaactcagggatgtaaatgcaccaatcagaaccctgtcaaaatggaccaatagctctctgtaaaacagactgactttctgtaaaatggaccaatcagcaggatgtgggtggggccagataagagaagaaaagcaggctgcctgagccagcagtggcaacccgcttgggtccccttccacactgtggaagctttgttctttcgctctttgcaataaatcttgctgctgctcactctttgggtccacactgcctttatgagctgtaacactcaccgcgaaggtctgcagcttcatctgaagcagcgagacacgaacccaccaggaggaacaaacaactccgatgcgctgccttaagagctgtaacaccgcgaggtctcgagcttcactcctgagccagcaagaccacaaacccaccagaaggaagaaactcaggaaaacagccgaacatcagaaggaataaactctggacacaccacctttaagaactgtgacactcgctgcgagcgtctgtggcttca

SEQ ID NO: 375 - DNA, 1030 bp, Homo sapiens
  repeat_region (1)..(1030): ltr13
tgtgggccgcaagccagggagctgcccaggcaagagcctgaaggcacaagctgttccagtacagcaaagaaaataattagaataagaaaagttttactagagataggaaacggataggattatatctgactattattaatcattagtttgtagcatcactctttgttctattaccataatgatctctgttctattatgattaccttgggggaaaccaggccacacagagttaggagctgaagggccacagtgagaggtgaccagaagacgagagtgtgagccctcattcacgcccagagaagggccgctggagggctccttggcctagcggtaatgccagtgcctgggaaggccctggttacttagcaggccttggtctagcggtggccccagtgcctgggaaggcacccgttacttagcagacccggaaaggaatctccctctctccaggggagacagagaacgctccgctccaccacctcttgtgggaggtctgacattagccaggccgggccgagtcatccggaggctccaacgtctgtctccctgtgatgctgtgcttcagtggtcacgctccttgttcactttcatgttcagcctgtgcacctggctcctccttttaagttcttagaagacagcagtagcagaactagtaggagtaccacagtcttcgatctttctgataagtgcatagaagaaacgctgacgtttgctgtcctccctctccacctcggctaccacaaagggaaaggccccctgtccagtggacacgtgactcgcgtgacctatcgatcattggagatgactggcactccttaccctgcccccttgccttgactacaataaatagcagcgcctccaggcactcggggccactacctgtctgtctccgcgctttggtggcagtggtcccccgggcccagctgtctttcttcctatctctttgtcttctgtctttatctcttcgatctctcgtctccgcacacacgcgaagagaaaacccacagacccggtaggggtggaccctaca

SEQ ID NO: 376 - DNA, 548 bp, Homo sapiens
  repeat_region (1)..(548): ltr14
tgttgggaaaaggacttgtggggtgcctgtataaactggccataaaaatatgggacaataagttgtggaaagccacaagaggcctctgaggagaaaagcctcctaattgccacgctcagagcgagacctgctctctcttatctgtaaacactgtattcaaggagaaagaccctcctttgaagcattggaatgtggacagacgtgcaggctcctagttaagcccactcccactagctactctccgataagttaaagatatgctgtttgagcacaaaggagattcatttaaagcgcttctgctgtagattatgcctgtgacgcactgctaccctttcactgttttgccctgaacatctgcttcttagatctaagttattgtactcaataaatagtgtggagaccagagctctgagccttttgcagcctccattttgcaattggccccctggcctccactctttatgaactcttaacctgtctcttctcattcctttgtcaccaccagacttcaggtaccctacaggtggtgttgaggctggtccccaaca

SEQ ID NO: 377 - DNA, 344 bp, Homo sapiens
  repeat_region (1)..(344): ltr14a
tgggagaaaagctgagtgttgggagagaagctgaggcagggcttgcatgtctgctagacttgctggctccttgcttctagcactcccattatctcaagcagccatatgtttctcattcacttgatacactgtttcctttcaacccccacatcctcaccacctgtttctttgtttgagcaccaataaatagcgtgggctcccagagctcagggccttcgcagcctccacactcgcgatggccccctggtcccactttctctctcaaactgtctttttctcattcctttgactccgccggactttgtcgcccccacgacctggtgttgggtctgatcaccccaaca

SEQ ID NO: 378 - DNA, 608 bp, Homo sapiens
  repeat_region (1)..(608): ltr14b
tgggagaaaagctgagtgttgggaaaagctgaggcagggcttgcatgtctgacataatgtaaaagagtcttggaacatgtccggggtccagggtctaaaacccctcgtggcctttggaacaccaagctctgtgctaaagggtggaaggctaccctgacgcaccataatctaagcccagggcataaaacccctcgtggcttggatagaatccagggctcgtggcctctggaatgtgtctagacttgctggctccttgctccttgctctcccaggatcgattgtatcttgagttaaaagaacctgctctccattatctcaagtagcagaacatgttccatatgcctcaaaggaaatgctaaaccatcacagctgtagatcatgcgcttaatgcaacttgccctttcgacccccacattctcaccacctgtttctttgtttgatcaccaataaatagtctgggcttccagagctcggggcctttgcagcctccatacttagcgttggccccctggacccactttctctctcaaactgtcttttctcattcctttgactccgccggacttcgtcacccccacgacctggtgttgggtctgatcaccccaaca

SEQ ID NO: 379 - DNA, 587 bp, Homo sapiens
  repeat_region (1)..(587): ltr14c
tgtgggaaagagagtttctggggtgccagttgagttggtctcccctgtgtgagacacccatgggaagccatgggcggcctctgaggagaaaagtctccttattgccttcatgtctttatgccccgagagcataaccgctcagcggcattccacaggttgctcagggagataacactcccttgaagcagtggagtataatcaaacatcttggctcctcctgaaacccactcccacccgtttcagtcccgataagttaaagatcttaagtagtttagacacacgcctttgctcaaggaaattcacagaaaccgccactgctacacatcttatcgaatgactcacgagttctccttcactgattaatccttttcctcatcccttcctccccctcccatctgccctaagaacaaagagcttgtaaaccaataaattgggtggagcccaagagctctgggccgtgagcaagcctccgatgctctggtcccctggacccgccttttaaacgcttattctgtctctttctaactcctttgtctccgccggactcggggtacccactgggtggtgtggggctggtttccccaaca

SEQ ID NO: 380 - DNA, 493 bp, Homo sapiens
  repeat_region (1)..(493): ltr15
tggaacaggaattaaaagaaattaaagaatgcataagcaaaaactcaattgtatgtagggaaacccaattcctcctgaggaagagaaagaggtggagtcctttaaaaattcactgcctgtttttccgtctgtagctagtgagccttatctctccctttcccaggcattgtgaagaccctgtttctccagctgtgcagctgcatggtcactagacagataaactcaagttgtaaaacatgtttttccttgaaaagtaagaaatgatgtaatacatgtctcaactgaataactgtctttgtttctcacttctgtagtaagcttccccctgcacagatctcccctctcaccccatgaaatgcttaaaaggtaacctgactctttgttcagggctcagtcctttggatgttaatctgactgggctggtgcacctaaataatamatayatcctcctcaaccccatcggtctctctgattcctaaatcatccccaaaca

SEQ ID NO: 381 - DNA, 450 bp, Homo sapiens
  repeat_region (1)..(450): ltr16a
  misc_feature (58)..(58): n is a, c, g or t
  misc_feature (124)..(124): n is a, c, g or t
tgtgacggacatgraggtgcgctgcccagatcccccttcaagaacggaartyttattncccyagctgctgggagwgctgtcggcagacagccctcagctgtcagccccttcaggaattgcctcngctgaagagagccgcctcgcccaaggtcacgccccctccccggggcagcccacatccaatgactgrtcaatrtggaggtataaaggcccggccctctcgccccaactcgggacaactctgaagggccatyccagctccagagctccccgtggggtcggctgaggcctttgttgcgactgcattgcagcccaacttctccctctgcccaatcctgcttccttcccttcccttccacaggcgttgatcccaagggcgctccctaataaacctcctgcacgctaatctccatctcagagtctgcttcccggggaacccaacctgcaaca

SEQ ID NO: 382 - DNA, 457 bp, Homo sapiens
  repeat_region (1)..(457): ltr16a1
tgtagtagatgctgttggtgccctgcccaggtcccytttmtcgggctagtgcatccattccccagctgctgtgagtgttggctgctaatggctcacagctgcccccttctctggagaattgccctcagctaataggagttgcctcacctgggaggttaccccccaccgggcagcccacagccaatagactgactgatacaggggtacaaaagcctagcycccttgcctcaaggtgggacaactcactctgtggtgcaattcatgctccagagctccccatgggatcaggctgaggctagacttcagctgaaaccacatccttgcttagcttcttcccctgccctatcctgcttccctcactcccttacaagtttctcctgagagcactccctcaataaatcacttgcacaagaatccctgtctcaggctctgcttctagggaacccaacctaagaca

SEQ ID NO: 383 - DNA, 387 bp, Homo sapiens
  repeat_region (1)..(387): ltr16c
  misc_feature (41)..(41): n is a, c, g or t
tgcctgaggrctttctctggccastgaagccagmtttgtcngcccacgtggcaagccggaaatgctggggagttaacaccccttggaagcagccctcaaccaatgasagatggggagttggtggataaataccccagcttcctcacccctcagkgggataactctgaggtatgtgttctacactgtctcccagagtttcccagyrggaytgagccccagttgcccacagtggtaacttgmtaatatacaytttattggcttccttctctttcctgtctcacttccccacttccctacyagtgtttcctgggatcacctcccaaataaactacttgcactcaaatccttgtctcagggtctgcttctgggggaacccaaactaagaca

SEQ ID NO: 384 - DNA, 464 bp, Homo sapiens
  repeat_region (1)..(464): ltr16d
  misc_feature (182)..(182): n is a, c, g or t
  misc_feature (353)..(353): n is a, c, g or t
  misc_feature (391)..(391): n is a, c, g or t
tgtggtggccatgaaaatgtgcctctcagatctcctgctgcagggagcatagttgactgacggccccagctgctgtccyttggratccaccactgcgtttgcaccaaggccacgcttccctcaggctactcccagccagtgactgagcacggcaggggtgctaatgcaggcccgttcctgsnagatgcgggactcctccgacgggcaactttggctcgaggactcctcatcagcctggttgaaactttcttagaactgcactgcagtctgaggctcttcctacccaatccttcttccttccccctctcctttcacaggtgtcagacctgcatcatggtccgaagtctctcctngcccgctcctgctccctccccttttatctttcacaggntttcccctaataaatctcttgcacatttaaccctgtcttggcgtctgcttctcagaggacctgaactaacaca

SEQ ID NO: 385 - DNA, 780 bp, Homo sapiens
  repeat_region (1)..(780): ltr17
tgagagacaggactagctggatttcctaggccgactaagaatccctaagcctagctgggaaggtgaccgcttccacctttaaacacggggcttgcaacttagctcacacccgaccaatcaggtagtaaagagagctcactaaaatgctaattaggcaaaaacaggaggtaaagaaatagccaatcatctatcgcctgagagcacagcgggagggacaatgatcgggatataaacccaggcattcgagccggcaacggctaccctctttgggtcccctccctttgtatgggagctctgttttcactctattaaatcttgcaactgcactcttctggtccgtgtttgttacggctcgagctgagctttcgctcaccgtccaccactgctgtttgccgccgtcgcagacccgccgctgacttccatccctccggatccggcagggtgtccgctgtgctcctgatccagcgaggcgcccattgccgctcccgatcgggctaaaggcttgccattgttcctgcacggctaagtgcctgggttcgtcctaatcgagctgaacactagtcactgggttccacggttctcttccgtgacccacggcttctaatagagctataacactcaccgcatggcccaagattccattccttggaatccgtgaggccaagaaccccaggtcagagaacacgaggcttgccaccatcttggaagtggcccgccgccattttggaagcggcccgccaccatcttgggagctctgggagcaaggaacccccggtaaca

SEQ ID NO: 386 - DNA, 358 bp, Homo sapiens
  repeat_region (1)..(358): ltr18a
  misc_feature (353)..(353): n is a, c, g or t
tgtaaggaaaatggmtgtgctkyrgtcaaggaataggccaaggcagacatccggtscagcatgactcagtargtttggagtgcaggygcacaacyccackcattatgtaaccayrycdcatgarrcgcatakgtaatcacycacrtgagctcatacttggctcggagccactattgtctgtraaaggtataactgccctgctgacgctgtgcacatggctcgcwyccacccagagagagaataaagccatgtctcaactgcctacggtccctcgagtgttytttcagctacccgccacycatccacccactcccctcggacctcagcttaggctggaacctgacacttggctntgaca

SEQ ID NO: 387 - DNA, 603 bp, Homo sapiens
  repeat_region (1)..(603): ltr18b
tgtaaggtatatggatgtgctctggtcaaggaataggccaaggtggacatctgggccagaatgactcagtgagtttagggtgcaggcgcatactccacttgttatataacctgtttgtgtaagctcatactgggctcggagccactattgtttgagaaaggtataactgccctgctgacgccgtgcacagggctyktgcgggcgcgcccraagaaaagagagagagccagagttgtccatcttgtagacggacaagggggagccagggctcggctcgcttgccacccagagaaawgagttaagctgctaaccctgtaagggagagcctaccttgtaggccagggaatgcagctgtgtgtgggagtggcaggagctgcagagctggagcagacagccgagataaaggtagacagtgtgagagagctgctgcgagagagctgctgatgagagagctagtgtgagtgagctgctratgaaagagctgctgaataaarccatattcactgcctacrgycccyygagtgttctttcagctatttgtcgcccatccacccactcccttcggacctcagcataggctggaacctgaccctgggtgtgaca

SEQ ID NO: 388 - DNA, 486 bp, Homo sapiens
  repeat_region (1)..(486): ltr19a
tgacagagcaggagcatcgccatcttggacaagcactgccattttaaagttccccttgatcaaaaaccgcctaaatccaacccaaagggcatcagcctaatggctaakgtcagcatgaccataaaccacaaatgacatctccgaccagaaacattccaaccctaagataaacccctcccyraccagagacatgccagccccgagataacctcccctccggccagagagatgtcagccccaasataacctccccttcaaccagagacattccaaccccacaataaacttctcccccacacagaaacattccaagcctgtgataaagctctctcaccctaaaacccttaaatactcttagtctgtaagagagagtgctcctgactgaaatcggccagaagcccctctcaggtttattctccaaaataaacctgtctttgactgttgagccgcttttcrtgtttctttcctctttctttaactcttaca

SEQ ID NO: 389 - DNA, 580 bp, Homo sapiens
  repeat_region (1)..(580): ltr19b
tgacagagcaggagcaccatcatctcggacaaacactgccattttaagttccagctccttttccagcctyatgcatttcaaggaaatcactttycttctaactacaagcagccagaaagagcagacagtaaaatacagataagacagctcgggcacagagggaggtggkrggaaagtctcttgggtaactgccaaacttyaccctcatacaatgggccccagtaaaayagkgggccttaataagcacattcctttyccttcgggtwcactaagatarggaagctaaaagcagactcagggaggcggcggggggtatgcctgcagctgcakraagatrtatgggarcagacayacaaytstccctcccagataagcacaacaaagagacacagaagcagtccaagcctctrataaactctctcaccctgaatccttaaaaactcttagtctgtaagagagtgtgcctctgacctaactcggccagaagcccctctcaggttcgttttctctaaaataaacctgtctttgttgactgkwgagccgcttttcgtgtttctttcctctttctttaattcttaca

SEQ ID NO: 390 - DNA, 826 bp, Homo sapiens
  repeat_region (1)..(826): ltr1b
  misc_feature (200)..(201): n is a, c, g or t
  misc_feature (224)..(224): n is a, c, g or t
  misc_feature (245)..(245): n is a, c, g or t
  misc_feature (322)..(322): n is a, c, g or t
  misc_feature (336)..(336): n is a, c, g or t
  misc_feature (620)..(622): n is a, c, g or t
  misc_feature (763)..(763): n is a, c, g or t
  misc_feature (770)..(770): n is a, c, g or t
tgatatggacaggagacagggaaatactgggtagaagagggtggttccccagcaaaggccccaccctcaagcctggagacctgcggccctaaatgggaacaggcattcctgttttcacgcccaaaaagttgccttttggcccaccacaccccctatcctgtacccatataaaccccaaaccccaggctccagaagcagannagcagacaaggagaggagcagangaggagacgagcagaagagcngcagaatagtgcggcagagaagagaaggaacgtctgaacgccgagaggagttcrgctrgggrcrgtcagagargagntcagccgctggayngccaaactccaggggaagatcatcttcccactccatcccctttccagctccccatccatcccactgagagccacctccaccactcaataaaaccccygcattcaccatccttcaagtccatgtgtgacccgattcttctgggatgctagacaagagcttgggatacagaaagctgtcacactggccctctgcccttgcaaaaaggcagagggtccactgagctggttaacacttaagccatctgtggacggcaaagctaaaagagyacactgtaacacatgccnnncccacttgggcttcrggagtcacaggcacccacccctagatgctgccatggggccagagcccaaaagcactcaccccagctcctgcwcctgcccgtctgcatgctccccctcctgtaaggggtttgagcgtgtggcgaccnaacagrngagccacacccctgtcrcatgtcctgcragggggrtcagggaactctcccatttca

SEQ ID NO: 391 - DNA, 449 bp, Homo sapiens
  repeat_region (1)..(449): ltr2
taaggaaggagaccacctctcccattgtctcctgtttcatgagaaagcaaaaagttaaaaaaagaagcagaagtgagatcaatggccagatggtttagtgccaagaaccaggcctggtagttaaacatcaactcctgacctaaccgcttgtgctatccatagattccagatattgtatgaggaagacttgtgaaactttctgttctgttctgctagcccccatcactgatgcatgtagctctcagtcatgtagcccccacttgcacaatgtatcatgaccctttcacgtggacccctcagagttgtaagctcttaaaagggacaggaatctttactttggggagctcggatcttgagacgcgagtctaccaatgctcccagctgattaaagcctcttccttcatagaaccggtgtctaagaggttttgtctgtgactgttcctgctaca

SEQ ID NO: 392 - DNA, 512 bp, Homo sapiens
  repeat_region (1)..(512): ltr20
tggtawtgaaaggagttagccagcttgctttaggcagacagtaagggaaagggtccccagagaacctccgacccgccccacaagtgtttacaccagatgttttgtgcagataagggaacttgcacagggggcttgcctaracatkcccacagtgaaaaattttwttcyttaacacatgckcagtaagaaaaataaatcaatatggagtagctcagactragggccyacatgcgcactggaaggatggggtggagccaccaggaattcgcaccttatgcaaatrrggaaccagcctcatcagcttytstataraagcyctkgtattcaactgtgaagtggcaaccwgmaacctgctttcaggacccctctcttttgctgagagcttttctcttcctttcgcttaataaattctgctcyacctcacccttcaatgtgtctgcatgcctaattcttcctggtcatgagacaagaacctggatytagctgagctaaggagcaaaaaccctgcatca

SEQ ID NO: 393 - DNA, 569 bp, Homo sapiens
  repeat_region (1)..(569): ltr20b
tgagagaggagaaaggaagaaactggtcaggcaggcagttagggtgggtcctcggttgaattctttcaaacaaaagaacagcctgcaggcacagataagggaacttgcacaggggggcttgcctaagacatgcccacagccgcacagataagaaaggctacacaggagacttgcccagacatgcccgcaatggaaaattccgtcccctgacacatgtgcagtaaggggaacaaagcaatatggagtaactcaagctaagggcccgcatgcgcactaggaggatggggtggagctaccagaaattcgtgccttatgcaaatgagacacccagccctcatcggtttcttataaaagcctttgcattcaactgtaaaaatggcaaccctcttccgggccccctctccgcggcggagagctttcttctttcgcttattaaactttcgctccaacctcaccctttgtgtccatgctccttaattttcttggtcgtgagacaaagaactccgggtgatacctcacaaggagagactgagagactgctacattgtggtgcattggcgagactaaca

SEQ ID NO: 394 - DNA, 505 bp, Homo sapiens
  repeat_region (1)..(505): ltr21a
  misc_feature (257)..(257): n is a, c, g or t
tgttagggacaaactgcccccaagaaagcttcttggtgctgcccacccctccccgcaaacctctccgcgctgcccacccttcccccaagcctytttacatttctaagcccttatctaggcaccacggtgaagccagcctgatagaagacttyacytatcagrccttgctgcaataaagcaaaccccaattacaaaccatccggaccgcacagggggaggtcgtgggaarcataaacaaactttacctacaccctccngtaccgtaaacgtcacaaggtgatatgtggcaraattaaccagcaaacaaccccgggatgcrgccataccaaagractccctcaaactccctkccccaatrtaaacccctcattctgtaagcttggggctgcttyccttgactgtkawgggggcagccgrcaggttaataaargcttgcctgaacttggggctctctctctytggtcctttctctcggctraccttacattctcactctctaagttca

SEQ ID NO: 395 - DNA, 438 bp, Homo sapiens
  repeat_region (1)..(438): ltr21b
tgttagggtcrcccyraycagacyrytcccttcccctcccacaggmcttacaatayrgtccyttgyrctctccgcacagctaccccagggcaaaaracaaaycccccttcactgayccytccagtaactgtscrgacagttacaggatgcggtyaacatrtctgttcacctcgcataacaaagctggcaaaaaaacatctccaggatgcrgacaagwcacytgcacccyygactcactcagctccccsacccyracccagttctcctgcacccccaactcagctcccgcaccccgacctrgttctggccctataaaarcctgctatwgtctgtaagyrggkctgcctcctyyaactgtggtrgagcagccaagcagctcaataaagcttgcttgcctgactttgggtctcytcatcctttctctcggctgaccttaca

SEQ ID NO: 396 - DNA, 580 bp, Homo sapiens
  repeat_region (1)..(580): ltr22
  misc_feature (431)..(431): n is a, c, g or t
tgtdgggrttcastcaggvtggtggsagaaatattaaagggaaatattagggaaagttataggaaataghcacaaaccttcttggaaggcctgaragtttgcawaacttcrgtaatagathtggctgaaggcagccarttcccttaccttwragcattarakcatagggtaaatacwaaggaawatagaggcttccccagttaagtctgtttaycctacytccattaactagcttgttkastcakgtggtcctmttggggmaggtcgaccagggatattgccccstaatggtatttacttyagaccwgggtgcctragctttaatcattactwgggstactctcttaacmatgtyaattacccwcwagtgtgttgactcaaagcctttgtyawtwaatctatactraataaatgcctgsagtgcyagctgnttagggccagcwgcwgtkacaaacctyycttggwgtstgtaagcggcctggacactcagctggactggcaaagcagaatatctgtgtgtcagtgtacrttttattcatccgtcatttgggtcagggtctgcgggtgacagacccccaca

SEQ ID NO: 397 - DNA, 458 bp, Homo sapiens
  repeat_region (1)..(458): ltr22a
tgtgggagatcggtcagagtggtgggaaaaactatagggaaaggacgcaaaccttctgaaaggtcagaaggttctgcagagccccgggggagaatagctgaaggcagctgttctataaccctgaggcagagggcaaggagtaggtacaagggagtgtaggggaatttatcttaaacaggcttgtttacttatgttgaccaggaactgacctttgatcatccgcgcgcgtgacgttccctgaaaggggaacaataaatgttaattacccgcaggttgtgtttgctccaggttttcggcattgtgcctgcactgaataaaagcaagcagctccagcttctcggggctgctctctggccactagagccaggcagtcacctagctgctcttacgctgcatacctgtgtctgagtactcatttcatccatcggtcggccagggtctgcgggacagacccggca

SEQ ID NO: 398 - DNA, 492 bp, Homo sapiens
  repeat_region (1)..(492): ltr22b
  misc_feature (234)..(234): n is a, c, g or t
  misc_feature (306)..(306): n is a, c, g or t
tgtaggggttcagtcaggctggtgggaaaaatattagagatagttatagaaatagacacaaaccttcttggaaggccgggaagtttgcataacttcggtaatagatctggctgaaggcagcctaatccctttacctttagttaaataaattagagtagaaacaaaggaatgtagaggagtttatctagmtagcttgtttactcatgtggtcytaagactaacctttgatctacngcaggtgcttaattgctttctacttgggaagtccacaatgtcaattaccctctagtggtgttgactcaagcntttgtcaattaatctttactgaataaatgcgagtctcactggctggtcggcaactgtttacagcactctcctgggagtctgtaagcggcctggacmctcagctggactggcaaagcagaatatctgtgtgtcagtgtactttattcatccgtcactgggtcagggtctgtgggacagactcccaca

SEQ ID NO: 399 - DNA, 437 bp, Homo sapiens
  repeat_region (1)..(437): ltr23
tgagaaaagaaaaaatagctyagagcagtctgagctatgtgaggtatgcaaaatttatcaggcccagagagacatgagtatgggacttcagtcatgtccctactccccctcrccatgcccgggggcaattgtttgaaggcattttgttcctgactagctgcctcatccattatcttcatgttcctggaatttgtgatacaaagaacaatgtatagccaatcaatagcywatgttattttaatgtaaattyytggtaaacaacttaaggaactscctcttctttttttcctttaaaaaccacttgtaactgctgctaattggagtgtatattcagggcaacttgaatctatgctcccaggttgcagtcctcaagcttggcccaaataaactctctacttatattaattttgcctcagctttttccttttaggttgaca

SEQ ID NO: 400 - DNA, 490 bp, Homo sapiens
  repeat_region (1)..(490): ltr24
  misc_feature (131)..(131): n is a, c, g or t
tgtraaattaaataattcaaacttaaagctgttggaacttkaaattattctgagccttgagaggaatgtggctatgcggcctgagtcatgtagcatgcagctgcaacttctgcttytctgatttagattancttttttccttattcctgtactgtaaatrattaggaagaccaaatggcgccagagataagaccccctcagatcactaccccttctcacagaatgataaagyaatcttccttggaatgtagcaakctgtaaccaatcaaatcgctgtaacatatgcactggycttgtatggaaaatgttgtaatcctgctaaaatttctctgtctctgcctatataagtgaaaccttaacttctccactttggaacgctgaccccattcctttggagtctgtgtttcctgggtggccatcctcaagctttgcgctcgaataaactctatacttaatcatattttctgaatctcattatttaaggttgaca

SEQ ID NO: 401 - DNA, 576 bp, Homo sapiens
  repeat_region (1)..(476): ltr24b
  misc_feature (7)..(7): n is a, c, g or t
  misc_feature (179)..(179): n is a, c, g or t
  misc_feature (189)..(189): n is a, c, g or t
  misc_feature (487)..(487): n is a, c, g or t
  misc_feature (494)..(494): n is a, c, g or t
  misc_feature (500)..(500): n is a, c, g or t
tgtaaantaaaataaaatttcaggaccctctaaatttattatgccaagggggaagttaagccctggagactgagtcagtagcatgtttgcaattctgtttcttagattatagattaactctcttcctcattgttcttgttctgtaaatgactaggagagaccagagaccagacctcccnccagctyccnttccaatcactgatctttgttatagattaactgcctcctttattgtcctgtacctaactcagaccagatggtgcaaaagaccccatgactgttacatcttcagtgtggaatgttaaatatacctttcccgaaagaaaaagaccaccttaactaatcagattgttgtaactatgcattaagccttatatagaaagatgttgaaattctgttaagcttccctaaactttgtctatataaatgatcccaaacttctacacttcggaacactgacttccattctttggaatctgtgyttccngggtggnccatcntcaaactttgcacttgaataaactctctttaaactagattctgacccttttgattattttaggttgacagtgcyta

SEQ ID NO: 402 - DNA, 794 bp, Homo sapiens
  repeat_region (1)..(794): ltr25
  misc_feature (477)..(477): n is a, c, g or t
  misc_feature (786)..(786): n is a, c, g or t
tgagaggagttaactaacttgccttaggtagacagcaagggaagggtccctggagagcccctgacccacgggtcagtgcctcatccccacataacataaaaaagcagcctgggaaaaaaaatcaagctgcaggcaccaataagggaactagcacagggggttgtgcctggagacatgcccacggctgcacagataggagaacctccagcccattcagataaaaacttacacaaacctccggctcactcagataaagaaacaaggcctgacataraaatgcctttgtcctttgtataatcagcgggctcccaggaaaaagtttcttctccttttgtgggcatgaacacagtgggctctggtgggttccggtggacactttcctttcctttttttggactgtaagcctggcctctatgaatcatcacttcagctcctgattgrtcccgggccaaggtcctgggccaaactgagtagccnctgtgaatcatcacttcaactyctgattggtcccaggccaaggtcccgggccaagctgagtcacacgttctccaagacagcccacagactaaacacattccttccccttcccagtccataaaaaccccagaccccagcctcatagkggrcaacccattcgggtccccctctccgctgrcagagagctttcttctttcacttattaaactttcactccaacctcacctttgtgtccacgctccttaattttcttggaggtrrgacaaagaactctgggtaytatctcagacaatgagagactgctacatnttggtgca

SEQ ID NO: 403 - DNA, 603 bp, Homo sapiens
  repeat_region (1)..(603): ltr26
tgaaaccgtccctataaactttataaaattaatcagggaagaagrgagggggagaaatgaaaataaaccaagcttgcagcacattcagcattaatcatkaggtcagcttgctctctgacctgcttcctcatagttgtttggtgcctattgcctyagaatcacgtagaccctgttacaagattatagttccccttaactgctctatagataacaacttgaacattatgaaacgttaagttttccctttgagatattccttcgggtcctgcataccgatgaaactactgacaactgacgycagctggtctgaaggaccccacgaggagctgactcaccaaagaatgcagtttccacatcctgatgatttcatcccccttaccccgaccaatcaacaaccccaattttccagcccctcgccctccatgatccccttaaaaaccccagcccagaactcctcggggagatggatttgagggtctcctcccatctcctcgctcagtgccctgcgatcattaaactctttctctgctgcaaaccctgctgtctcagtgtaattggtctgttactgcgcagtgggcatatgaacctgttggtcctataaca

SEQ ID NO: 404 - DNA, 622 bp, Homo sapiens
  repeat_region (1)..(622): ltr263
tgaaaccatcctcacagggctaacaagaattacatgccgggttctgggcagaaatatagttataattaagcattaatcaggctgcactttggcccacttccttgtaactaaaagtcatgtagcactagatactgaccatttgcatccccattgttcctatagataggatttctgaccttagaatcataggtttttgtttaagaattgatttgcatccccattgttcctatagacaggatctctgaccttagaatcataaggcttttgtttaagaattgcttaagatgtttttcagatcctgaattccagcggaacagctgatgccaaccagtttgaagacccccacagaggaaccgaatcagcatgagaacgcagtttcttcatctccctgtcccatgacttcaccctgcactcttcgaccaatcaacgatccccacacctcggcccactccaaaccccttaaaatccctagccccaaactcctcggggaggcggatttgaggtttcctcctgtctcctcattcggctgccctacgattattaaactctttctctgctgcaaccctggtgtctcggtgtattgacttgccgcgcatcgggcaacaaacctattacggtcaca

SEQ ID NO: 405 - DNA, 636 bp, Homo sapiens
  repeat_region (1)..(636): ltr27
tgtgagagcagcaggaggcagccaatgcctaggtaggcaggggcaggtccctgtgaaacctcacctccaggccgaagacagcttaaatcctgaaagccaagctaccatttaaatccttggaccagactgagaacttgtcttcctgtttggtgtgctttcctctgattgatccctacccttcacctattttatgtatacctaccctttcctaattggttttctgtactgccaggcccacttctgcgtggtgtctttgctttaaccttttttgcatactcacaaaccaatcagcatgcactccccattctgagtccataaaaggccctggacccagccacatgggggactttcctgccttcaggtagggggaccacccctgtgtcccctctgtatttaaagctgtttcatcattcaataaaattcttctctgtcctcctcacacttcaatgttcagtgcatcctcattcttcttggatgtgggacaagaacttgggaatcagtgcacaagccagacttggcctgggaaggccaactgggcagggcacctcctgcggcagatagcatgccctgggcaaggcctctggcatcgccagccagaagtccctgactggcaaagggaccgagaaaaatcctgca

SEQ ID NO: 406 - DNA, 1020 bp, Homo sapiens
  repeat_region (1)..(1020): ltr28
  misc_feature (356)..(356): n is a, c, g or t
  misc_feature (379)..(379): n is a, c, g or t
tgatagcgacaggaggcagmcaaatgcctaggcagataggggcgggtccccggtgaaaccccaccttcaagccaaagacagtttaaagcctgaaagccaagctacaagtcccggataaatcctcagaccggaktgagaacttstcttcctgtttggcgcgctttcctctgattgatccccacccttcacctattttacatatacccaccctttcctaattggytttttacactgtcttgcccaccttcgaatgttgyctttkttttaaccttttttgcatactcacaaaccaatcagcacgcactmccccccatcctgtgcctataaaaaccccagactcagtcagtagaggagangacagcttgacttcatasttggnagaagrattgggagagagacaacctgacttcagggaagacgacctgcccttcccgtcccctctccagctcccctctccactgagagccgctttcatcactcaataaaattctccgccttcaccatccttcaattgtcagcgtracctcattcttcttggacgccggacaagagctcgggacccaccgagtgcgggtacccaaaaaggctgtcacactggccctttgccctcgctggcggagggcagccgccccacatgacagaagcagcggcggggctgagccagccchagagccaygggctggagtgaggcaaggggccgactgagctgttaacacgcatccgtctgcagacggcagaactaaaagagctawttagcayactgtaacaccccctctggggcttcggggtcgcgggcayccytacctgggtgctgccgcattcccctccaggtgacatgcctggtctggccgcaggccctgcacagagcttgctcctgtgccggtgcccgaagcagccggccagatcccgcactcgctcgctcgcgtgctccctcccgcaaggggytgagcgbggcgggctgagtagacggggcacccctgccatgagtccggtgaaggggycaagaaaaatcctgcatca

SEQ ID NO: 407 - DNA, 619 bp, Homo sapiens
  repeat_region (1)..(619): ltr29
  misc_feature (87)..(87): n is a, c, g or t
  misc_feature (89)..(89): n is a, c, g or t
  misc_feature (107)..(107): n is a, c, g or t
  misc_feature (199)..(199): n is a, c, g or t
tggggctcagaaaccgataccccaaaatatggcgttttgwacatgctgaactgaagaagcctcaaggtttctctgacctccccccanancccccactgtctctcccnaatataagttgaagttcccttatctgcctaaagtccagacccaccaaggagaacaattgttttttgttcccctccctgagtttatctcattngaatctattrcaggaaagaagaccaaagaatgtaaccacacctgaacagaccctttttcaagataatgacttttgtcacaaaycattgtctccaaggatcatttaaattccaaagagaactatttacaagttaatttctgttccyysatccaagatccawtcattctccctagtaatcatttattgcccctcaatagaattcctcttctcccccttcccataacctgttttaccaggatccaagcccccattctttctgtaacctcaagatggtatataagcttctgyacctcattgggaagttgggtcttcattctgaaggctcccatgtatacacgttaaataaatttgtatgccttttctcctaytaattaatctgccttttgtcagttgatttttcagcaaaccttcagagggcca

SEQ ID NO: 408 - DNA, 490 bp, Homo sapiens
  repeat_region (1)..(490): ltr2b
tgagggaagagagagaccctctcatattgttttatattgttttatactcagtacctgttttaagaaaaaaagaaaaaacaacaaggaagtaaaaccaaagacaggcagcccggcgccaggcccgaaaccaggcctgggcctgcctggcctaaacccagtagttaaaaatcaactcatgacttagaaaccgatgttattcatagattccagacattgtatagaagaacattgtgaaactccctgccctgttctgtttctctctgaccaccggtgcatgcagcccctgtcacgtaccccctgcttgctcaaatcaatcacgaccctttcatgtgaaatctttagtgttgtgagcccttaaaagggacagaaattgtgcactcggggagctcggattttaaggcagtagcttgccgatgctcccagctgaataaagcccttccttctacaactcggtgtctgagaggttttgtctgcggctcgtcctgctaca

SEQ ID NO: 409 - DNA, 429 bp, Homo sapiens
  repeat_region (1)..(429): ltr3
gttggaggccgaaagaatagggtcgtgaccaactcagtataccactggaggctatatgagcaaacagcaaactgttctcatgaatgcaggatgctggcaagctgacaactgcatctgccaccagaaggaatgctgagggcagtcataccccacgtgcagtgttccttgtggttatctataggaatatctggaggctgttgtataaagaaagcaattatgtgagcccgtgataaatcaagcagctgaccaaccattacctcttcctccctgttgattctacctaataaatacaaagggctgtagaagctcagggcccttgttccctagaagaaaggagccgcctgtctccttctttaaaacagatctttttgtctttgtcttcatttctgcatttgttctcttttgttcagtcccaaaccgacagccata

SEQ ID NO: 410 - DNA, 722 bp, Homo sapiens
  repeat_region (1)..(722): ltr30
tgagaggaggtkccagctgggcttcctgggtcgagtaggggctcagaaagctgtgaaactcactcatttcctgcatcaggacttacttcggtcctggatgaataatattgaagatatatgcttaaaatattcctaacaycaggatttgtgcatgtgttttcttccccaagaaagctataaacagcaaaaattttgctgtaagcttccctgtgtccttctctccctctctcccttccccctcccctaaaactaaagtaaaaggaatgttaaaagcccattattttctgtgaccagcagaccttatctatgctcccaattccaattccttgtaaacacactttgtaaartcctgtragatcctgtctcctttgccatgccgctgcaaggtyataaagtagataaaacytaagttrcaattccggttttcctcaagatctaagacatgtcmcaaaataatttactgyctttgtttcttgctctggtaacatcttcccgccgcacgtatttcccgccttaaagagtttaaaaggcgatcaaacaaatctaacactggctacccgctcgggaccccttccacgctgtggaagctttgtactgtcactctgctcaataaagcctacagctttttttctctcttggtccgatccgtgtctctcwctcgccgcgggcwgccgccacaccaaatctttggcgtggctaaggcaagaacctttggcgttaca

SEQ ID NO: 411 - DNA, 619 bp, Homo sapiens
  repeat_region (1)..(619): ltr31
  misc_feature (36)..(36): n is a, c, g or t
tgcttgcttttggtcacttgctttgtgttatcgttnttattkttttcctttttccatgaagctgaaggccgcagtagctgaaggccttgccgctgaatgctgaaacttaaccttcactggctactttatagataacattcataggtcaccacggtaacggttgcttacagttgtttttcarggaactkgggccagctcctgtccagttcaaaccggttgagaccackaacccttcaactgggcctgcgcaagtgcccaagaggtggccttttgacgtcggagggccaaaaactccaccctcagatcacgctaacgccaccattttctgtacatgtgtcctatgaartgccatgaagcccgactacgcttgcgcagaatgaacctrttacttcatttttccccactgccaatcacctttccccacaccttagaccaccccgcttctctaacccataaatatccctaagccttatcttcggggaggcggatttgagagctgttctcccgcctcctcgcttggcggccttgtgaataaatcttttctcttttgcaaaacccatcgtcacagtgattgrcttactgcgcgcgggcagaacggacctggacctggccagtaaca

SEQ ID NO: 412 - DNA, 471 bp, Homo sapiens
  repeat_region (1)..(471): ltr32
  misc_feature (5)..(5): n is a, c, g or t
tgtcnataaccaagtgtatggtagacgcacctgacagcaataacttaagcataccctgagaatgaccctgtatggcagatgcacctgaatgtgtgtttggagttctgagctaaggaatccgggagtggccaacccggagattcattccttatctatgaggaacatctgagcccccggcccgtcccgtggaacgcaggccatacaggggatcgaggccctttgttttgggttaaatgaaggttgccaggtggaggttgttagggggagggtgctaagtgaaaatgctatataaactgcatgctttttrcaagcggttgcggttctcctgtccagcccaccaccactggactgtcttccctgtatgtaagtccccaataaaccctatgtctcatttgctggctctgggtctcttcttcggcctcttgaacctggtgccatccctattggagtcaataggggtccggcacaaca

SEQ ID NO: 413 - DNA, 521 bp, Homo sapiens
  repeat_region (1)..(521): ltr33
tgtgctggatatcttctgtttgcccctccagatccactctccacccttctccaccctgctctgtgccccgggaggctgacctctatggactgcatcamcgggctcccttgccctctggcttctggttgggtttggccaatgggaggcactggcaggagattggagggtggaaggagagwgagatcggggtatttattccccyggctccctccctgctgggctgcggtttggcagtggctgcgttcctctaccgaaggccacagctcctgtcgggcagccctctccttgtagctacagctmcagctctctctgggttccggtaacmgctccctccccttgccccttcaggcctaggggtggtaacagctycccgctgttgctagccccggggtgcttcaccatcccttgttggtttcccttaaccctgcccacacctttgtaaatagtcccttcattaaactctcctcaattactccatttgagtgtgccatctgtttcctgccgggaccctgactgataca

SEQ ID NO: 414 - DNA, 523 bp, Homo sapiens
  repeat_region (1)..(523): ltr33a
  misc_feature (49)..(49): n is a, c, g or t
  misc_feature (113)..(113): n is a, c, g or t
  misc_feature (126)..(126): n is a, c, g or t
  misc_feature (128)..(128): n is a, c, g or t
  misc_feature (200)..(200): n is a, c, g or t
  misc_feature (261)..(261): n is a, c, g or t
  misc_feature (403)..(403): n is a, c, g or t
tgcctatttgctctcagatccatccctgcccttytcctgctctgctctntatcacaggaactgcatttcccaggctcctttgccacctggcttctaggtaggtttggccaatnggaggcactggcngnaggagattagagggcaggaggaagggagaagccagggtatttctccccctccctctctgccttgggcagtantctctctagcagcagttgcatgcatctcctctgtggttccagctcctaccagacagccccnccctctgtggttccagcttctaccaggtggccctggctcctgggctctggtaattccacctcctccctccctttgtccctccagccctaggggtggtagtagcttcttgctgttgctaatctctgggttgcctcaccattgnttccctgtttggcttctcagctctttcatcacctgtgtaaccaattccctgtattaaattccctctgtttgaaatacctagagtggtttctgttttcctgattggaccctgactgataca

SEQ ID NO: 415 - DNA, 699 bp, Homo sapiens
  repeat_region (1)..(699): ltr34
  misc_feature (33)..(35): n is a, c, g or t
  misc_feature (40)..(40): n is a, c, g or t
tgtaaagaaaaataaaaaatctcaggacccccnnncyccntaaactccttatgcccggaggccgagtcattgcaacaccctcttccaaatgaatagctgttactagcatcatgcatcagccagatccccaaggaaaggtaaaaggcctcaggcatctgcaaaagactgcccccacagatcattcataagtaaattctttgctggcctcccataaacaaggacatgccaattgtaactttaggtctgcaacctaagtctagctcctaaaactaaagtctgttcgattccacactgataatgtcaattacaagcttatcttcccaggtgcagaacaaagacaaggtgagatcagtcatttcctccacctacccagagacgtctgcataattgactcttcctttactccctttttctcttcaaacattcaccttatcttatgtaaaatatagatttactgggcactaactaaagtctcacaggaatgtaarccatttgccttaccgcctacctgcccctcttcctacatgccttcccycactttaaggaaatgtataaatactaaacctcctgaaaacctcttcagaaaaagcagccacagatgtgtctgtggctcgcgtttttcccggacatgccctaaagctggcttaataaacctcgattgattgagacwtwtgcctcagtcactcattttggttgtca

SEQ ID NO: 416 - DNA, 599 bp, Homo sapiens
  repeat_region (1)..(599): ltr34b
  misc_feature (366)..(366): n is a, c, g or t
  misc_feature (476)..(476): n is a, c, g or t
  misc_feature (486)..(486): n is a, c, g or t
tgtgggagaccagaatatgccaccccaaaatatgcctctttggcataaggaytgttgagctgaaggcaattaagaagaagcagatgcaggaaagctctctgccctccctctatttgcctaaaagcaggacatagatttacaaagacaaaaggtatcctgcccccaccccttctaccagggagaacaaaggttaaccactgaagacaactttagacccttattggcctggagatggtaccagaggaatctacattaacaagccttactaactagcctttatctgccagttatttgccttcccacaagttgctgcccctagagactcaaagtccttttcctttgtcttgtcacttctctaaaaatttnttttactgttctttgttgaagatgctatataagctggaattcaaagccacctctttgagaactactcattctctgggtgtctcccatgtatatatgaaatatacatgttnaaaaataaanttaataaacttctgtctgtttttctcttgttaatctgtcttttgttacaggggtctattccaactaagaacttatgagggttgaggagaaaaaattatttttcttcccctaca

SEQ ID NO: 417 - DNA, 616 bp, Homo sapiens
  repeat_region (1)..(616): ltr35
  misc_feature (102)..(102): n is a, c, g or t
  misc_feature (167)..(167): n is a, c, g or t
  misc_feature (169)..(170): n is a, c, g or t
  misc_feature (610)..(611): n is a, c, g or t
tgagacagagtagggatggggcttggyttcagctcacccccactrgagcattctttcatgcattcccactgatcacaaaacccacaccactacctcactganactatayccgctawymkksrkrywywrrwmatasmmakwmwatawwswtyytttkkksmyyycwnanntttaaccatgccttttacttaaagaattccaggaactggccttaggagatcyaaacatcgaaccaaggttgcagagtgtcccacctcgggaaggaatgctgaacaattgatttacagccttgttgccgctggccagaccaccaggtggcccattactcaagataaccatcgcaaccagataatgctgacctgcataccctaccytcacgtgctttgcccagcccagcctgcataccctacccctgatgtcaattcccgcgctttgcctaataaaaaaatccctaccggctcttttcggggaatcagctcarggaattctckctctctcttctgctgtctcccttgtgcycragcataagctccaatraagccttgtctgggaaaactgcttggycccgtgttaatttcyattacatggrgagcccaggaacctgtggtcnntaaca

SEQ ID NO: 418 - DNA, 1450 bp, Homo sapiens
  repeat_region (1)..(1450): charlie1a
  misc_feature (249)..(249): n is a, c, g or t
cagcggttctcaaagtgtggtccgcggacccctgagggtccccgagaccctttcagggggtccgcgaggtcaaaactattttcataataatactaagacgttatttgcctttttcactgtgttgacatttgcactgatggtgcaaaagcaatggtgggtaaaactgctggcgccttagcacggatcaaggcagtggcaccaaactgtactagtagtcattgtattcttcaccgccacgcgctcgcagtnaaaaaaatgccagtttcacttaagaatgtccttgatgaagcagtaaaaatkattaattttattaaatctcgacccttgagyacacgtctttttaatattctgtgtgacaaaatgggaagtacgcataaagcacttctgctgcataccgaagtacgatggytgtctcgaggaaaagcacttgtgcgattgtttgagttgcgagctgaactagctacttttttcatggaacaccatttttacttgaaagaacgactgacagacaaactrtggttattcagacttgggtatttggcagacattttctcaaaaatgaacgaagtgagcctgtcacttcaaggaaaacaactgacggtatttgttgccaatgataaaattcgagctttcaagcgaaaattagaattttggaaaacttgtatctgccaccgtgagcttgacagcttcccaatacttaaagacttttctgatgagatcggtggtgatattaacgaatgtgattttttgatattgtataatgaaatgtgtcaacatttggaagatctgcataactcagtgaaccartattttccaaatgaccaatgcatgatgttacaaaatcatgcatgggtaaaagatccattcaaagcgcaagatagaccaatggattttaatgtaacagagtacgaaaagttcattgatacggtttcagattccacaccgcaactaacctttaagaaactaccacttgttgagttttggtgtagtatcaaagaagaatatccacaattatctgaaaaggctattaaaatactcctctcttttccaactacatatctgtgtgaggccagattttcttcatatacttcaaccaaaacaacatatcgcaacagattgaatgcagaagcagatatgagaatccagctgtcttctattaagccagacattaaagagatttgcaaaaatgtaaaacaatgccactcttctcactaaatttttttgttttggaaaatacggttatttttcataaaaatgttatttatgttaacatgtaatgggtttattattttwaaatgaatwaataaatattttaaaaatttctcagttttaatttctaatacggtaaatatcaatagatataacccacataaacaaaagctctttggggtcctcaataatttttaagagtataaaggggtcctgagaccaaaaagtttgagaaccgctg

SEQ ID NO: 419 - DNA, 518 bp, Homo sapiens
  repeat_region (1)..(518): charlie1b
cagcggttctcaaagtgtggtccgcggacccctgagggtccccgagaccctttcagggggtccgcgaggtcaaaactattttcataataatactaagacgttatttgcctttttcactctcattctctcacgagtgtacagtggagttttccagaggctacatgacgtgtgatgtcgcaacagattgaatgcagaagcagatatgagaatccagctgtcttctattaagccagacattaaagagatttgcaaaaatgtaaaacaatgccactcttctcactaaatttttttgttttggaaaatatagttatttttcataaaaatgttatttatgttaacatgtaatgggtttattattttwaaatgaatwaataaatattttaaaaatttctcagttttaatttctaatacggtaaatatcgatagatataacccacataaacaaaagctctttggggtcctcaataatttttaagagtataaaggggtcctgagaccaaaaagtttgagaaccgctg

SEQ ID NO: 420 - DNA, 224 bp, Homo sapiens
  repeat_region (1)..(224): cheshire_a
caggggtcggcaaactatggcccatgggccaaatctggcccaccgcctgtttttgtaaataaagttttattggaacacagccacgcccattcgtttatatattgtctatggctgcttttgcgctacaacggcagagttgagtagttgcgacagagaccgtatggcccgcaaagcctaaaatatttactatctggccctttacagaaaaagtttgccgacccctg

SEQ ID NO: 421 - DNA, 338 bp, Homo sapiens
  repeat_region (1)..(338): cheshire_b
caggggtcggcaaactatggcccatgggccaaatctggcccaccgcctgtttttgtactgcccgtaaactaagaatggtttttacatttttaaatggttggaagaaaaatcaaaagaagartattttgtgacatgtgaaaattatatgaaattcaaatttcagtgtccataaataaagttttattggaacacagccacgcccattcgtttatatattgtctatggctgcttttgcgctacaacggcagagttgagtagttgcgacagagaccgtatggcccgcaaagcctaaaatatttactatctggccctttacagaaaaagtttgccgacccctg

SEQ ID NO: 422 - DNA, 6896 bp, Homo sapiens
  repeat_region (1)..(6896): harlequin
tttcttggttccctgaccaggaagcgaggtgattaacggacggtcgaggcagccccttaggcggcttaggcctgccctgtggagcatccctgcrggggactccagccagcytgagtgacgcggatcctgagagcgctcccaggtaggcaattgccccggtggaacgcctcgccagagcagcgcgtggcaggcccccgtggaggatyaacrcagtggctgaacaccgggaaggaactggcacttggagtccrgacatctgaaacttggtaagactagtctttggaacttgccccactccatttgagtggaagcgtggcctgatcacccayggtgtgcctgtactggcactttggtttttgtttttgacttgacttggattgcttgatactttggttttggttttgacctggcttggatttctggatactctgattttggttttgattttggtttggtgtaaactgtaaaagtgtgtgtgtgccctttttacccgttctttgttttgtggtgtgcatgtggtgtgagcgtggtgttttgtctcgaagaagcatgggtcaggcacaaagtaagcccaccccactaggaactatgttgaaaaatttcaagaaaggatttaagggagactatggagttactatgacaccaggaaaacttagaactttgtgtgaratagactggccagcattagaggtgggttggccatcagaaggaagcctggacaggtcccttgtttcaaaggtatggcacaaggtaacctgtaagccagggcacccagaccagtttccgtacatagacacttggttacagctggttttagaccccccacccccacagtagttgagagaacagcagcataagcggctggcagaggcaaggaaagaccagcagagagavagagagaggaaagagacagagaggaaaagaggcaaagagagagaggaaaagacagagaggaagagacaragagacaaagagrgagtcaagaagagagaaagagggaggcagagagagaggaagagacagaggcaaaaggaaagtcagagagagacagaaagtcaaagagagaaagaaagagagaaatatacaagtagttaagaaaaaaaacagtgtaccctattcctttaaaagccaaggtaaatttaaaacctataattgataattaaaggtattctccgtaaccctgtaacactccaataccactttgttgtcagtgtaaacaagggcgtatcccraaagcactgaggccttcctatcaaaaatccttaacccagtaacccgcggatggcccaaatgcattcaatctgtagcggcaactgctttgctaacagaaaaaagtaaaaaaaataacttttagaggaaacctcattgtgagcacacctcaccagttcagaagtatcctaaagaaaagaaaaaagaaaaggatgatttaacattaaccactgaaaattctcttaacccagcagktttcctaacaggggatctaaatcttaattaccatacaaaggtccgaccagacctaggaggaactcccttcaggacaggabgatagatggttcctcccaggtaattaaagrrrgaaaaaaagccatctataccaattctaagttaatttggactaaacaaggtcttattaatagcaaaggataattgaaatcccaaacttacaaggttttcaacaaaagtaaagtttgctaaaagttaacagtgtaacatgtattatagtaacttctaatcttgtggccttagacagtctagtccacagacataaaggaagttcgctttggaaaagaatrgttatcatcttcgaaaaaaaaagagaggraagagggggcagaatttatgtaaaaagagtgttatatggtaaattcttgtcctgaaataaattaactggttgtttaaagaaagaaatgtttgtaataagtcagaaagttgagrcatgtcgaagaattgtctgcgaaagtcgtgaaagaaaaaaatgttataaaaaaagaatttatgcaaraaatgttgtataatttaaaagtaatwaggcctcctgaatgtaaaactattgaaaaaacagtttatgtgcaaggtgtataagaaaagtaaaatatacctttggtaaaaggattataaggaggcataagaatgtggatttttacctacattaaaaggttaaaaaaattattgttttgaaggtttaagcaagttttaaaatgttaattgtaaagaaaattctgtgtgtaaacatattagctaaagttaaagaggtatcatccagtttttctgtgaactggacattaaagtaaaaacgcaacgggtttttcttaaagcaccaacctgctctttaacaaaaattataaaaggttaaaaagagtctataaaaatcttaccttatggtcaaacattaaaaattgrataaatatgtctacaaagttttattaaaaytaagtttaacattaataacacactaatataaaggtaaaatttagcttatctggtataaaaatcatacaagaagcattgtyaaatataaaatggtgtttggctttctttggtctaaaaactaataaaaataggtgctaaaggaaatttctcagtaaaaaggcaccaaggactataaagtccactgctgatgttcccacatttaaaacaaaaggtcaatttcttaaaaattatatacttggtttatcttccactttcctttccctcaaaactaaaagtcttttagcacatgtaccacccctagaatttccagtaaaccagcaccagcctgaagatcacgttctcatcaaagggtggaaagaaggaaaacttgagccagcctaggaaggaccctaccttgtgctgctaaccaccgagactgctgttcgtacagcgaaaaaaggatggactcatcacacccgagtcaagaaagcgccaccccctccagagtcgtgggccatagtcccaggggaaaaccctaccaaactaaagctaagaaaaatttaactctttcatctattctattactctttcttctttcctcgctctattgctgaccatctagttattaacataaccaagtcaatttcgcctcaaactattgcatttaatgcttgccttgttataccctgtggggacttgccaagtcaaagacagctctctacttcagaaaagtacctctgtccctcctgactctcctcagactgggcattagtaaattaggaccatttaatccggggagatttcgataaagaccccagtgtcaaccaggagtcttgccccccaatgtagagcttttatgccatagttggtccaacgttctgtggaccactaaagagcaaggatggactgccccaaccggtttttgtaatttcctaaaatcatacattcattttactagaggatcatagaagttaaagacttaaaacaaactttggcaattaagacaggataccaagatgcaaatgcctggttggaatggatcaaatattccatccgcacgttaaacaaaagcaattgttatgcttgtgcacatggcaggccagaggcccagattgtcccctttccactaaggtggtcctccagtcgaccaggcgtgggctgcatggtagctcttttccaggattctacagcctggagtaataagtcatgccaagctctctctgctatatcccgaagtccagcaccctgtgggtcagcccccgagggccatccagcttccgtctcccaacactaagttcacttcgtgtctctcacgacagggaggaaacttagcattccttggagacctgaagggatgcagtgagcttaagaattttcaagagcttatcaatcagtcagcccttgttcatccccgagcggatgtgtggtggtattgtggtggacctttactgggcactctgccgaataactggagtggcacttgtactttagtccaattggctatccctttcaccctggcatttcatcaaccagagggaggaaaaataagacatcgtaaagcgagagaagccccttatrggtctttcaactctcacgtctatttagacgcaattggagtcccacgaggaataccagatcaatttaaagcttgaaatcaaatagctgcaggatttgagtcaatattttggtgggtgacagttaataaaaatgtagattagataaactacatctattacaaccaacagcaacgagcttttcatgagttaaaagaaaaactcatgtcggccccagccctggggctacctgacctgacaaaaccctttacacyctatgtgtcagaaagagaaaaaatggcagttggagttttaacccagactgtgrggccctggccaaggccagtggcctatctctcaaaacaactagacggggtttccaaaggctggcccccatgtctaagggccctggcagcaacggccctgttagcacaagaagcagataarctaactcttgggcaaaacctaaacataaaggccccccatgctgtggtgactttaatraataccaaaggacatcattggytaacaaatgctagattaaccaagtaccaaagcttgctctgtgaaaatccccgcataaccattgaagtttgcaacaccctaaaccccgccaccttgctcctggtatcagagagcccagttgaacataactgtgtagaggtgttggactcagtttattctagtaggcccaacctccgagaccatccttgaacatcagtagactgkgagctgtacgtggacgggagcagcttcgccaacccctgcaaagtgactctgaagaagacgacaagccctgctccagtcacacccggaagctgactggtccacgcacggccgaagcatgagaaaactcatcacgggactcattttccttaaaatttggacttgtacagtaaggacttcaactgaccttcctcagactgaggactgttcccagtgtatacatcaagtcactgaggtaggacaaaargttgctacagtcctattattttatggttattataagtgtactggaactctaaaaraaacttgtttgtataatgytattctatacaaggtatgtagcccaggaaatgaccaacctgatgtgtgttatgacccatctgagcctcccatgaycacagtttttaaaataagattaaggactgaggactgctgggggttcataaatgatacaagtaaagtgttagccaaaacagaagaaaaaggggtgcccaaacaagtcaccttaaaatttgatgcctgtgctgttattaatagtaatmagtataggaataggatgtggttctcttaattgraaaaaagaggctatacggcagaaaataagtacatctgtcatgaattaggactgtgtggaaataartgtaaatactggtcttgtgtcatttaggctacttagataaaaaatgaaaagaatcctgtccaccttcagaaaggraaaagtggcccttcctgtaccagtggwcagtgtaaccccttagaactagtaataaccaacccccttgatcctcactggaaaaaaggggaacgtgtaaccytaggaatcgatgggrctggactggatcctcgagtaaatatcwtagtttgaggagaagtttataaacgctctcctgagccagtatttcaaacyttctatgatgaactgaatgtgccagtaccagaaattccaggaaaaacaagaaatttgtttttgcaattagccgagcatgtagcccagtctctcaatgtcacttcatgttatgtatgtggaggaactgtaatrggagatcaatggccatgggaagcccgagaattagtacctacagacccagttcctgatgaattcccggctcaaaagaatcaccctgataatttctrggtcctaaaagcctcaatyattagacaataytgyatagcaagagwrggraaggahttcacycwtcctgtrggaagactyagttgccttgggcaaaaactgtataatagtaccacaaaaacagtcacctggtggagttcaaaccacacwraaaaaaatccatttagtaaattcccaaagttgcaaaccgtgtggacccacccagagtcccaccgggactggacagcccccactagattatactggatatgtgggcatagagcttatgccaaattacctgaccagtgggcaggtagttgtgttattggcactattaaaccatctttcttcctactgcccataaaaacaggcgaactcctgggcttccctgtctatgcttcccgcgaaaagagaagcatagctatagrwaattggaaagatgatraatggccccctgagaaaatcatacaataytatrggcctgctacttrggcacaagatggctcgtggggataycggacccccatttacatgctcaaccgaatcatacggttacaagctgtcttagaaataatcactaataaaaccagcaragccttgactattctggcccggcaagaaactcagatgagaaatgctatctatcaaaatagattggctctcgactacttgctagcagctgaaggaggggtctgtagaaaatttaaccttactaattgctgtctacacatagatgatcaagggcaagtagttgaagacatagttagaaatatgacaaaactggcacatgtgcccgtgcaagtgtggcatggatttgatcctggggccatgtttggaaaatggttcccagcgctaggaggatttaaaactcttataataggagttataatagtaatagaaacctgcttactgctcccttgtttgctacctgtacttcttcaaatgataaaaagcttcatcgctaccttagttcaccaaaatgcttcagcacaagtgtactatatgaatcactatcaatctgtcttrcaagaagacataggtagtaaraatgaaagtgagaactcccactaatgagtgagattctcaaagggggggaa

SEQ ID NO: 423 - DNA, 7418 bp, Homo sapiens
  repeat_region (1)..(7418): huers-p3b
  misc_feature (163)..(163): n is a, c, g or t
  misc_feature (219)..(219): n is a, c, g or t
  misc_feature (238)..(238): n is a, c, g or t
  misc_feature (241)..(241): n is a, c, g or t
  misc_feature (258)..(258): n is a, c, g or t
  misc_feature (300)..(300): n is a, c, g or t
  misc_feature (408)..(408): n is a, c, g or t
  misc_feature (851)..(851): n is a, c, g or t
  misc_feature (1175)..(1175): n is a, c, g or t
  misc_feature (1210)..(1210): n is a, c, g or t
  misc_feature (1306)..(1306): n is a, c, g or t
  misc_feature (1366)..(1367): n is a, c, g or t
  misc_feature (1387)..(1387): n is a, c, g or t
  misc_feature (1474)..(1474): n is a, c, g or t
  misc_feature (1510)..(1510): n is a, c, g or t
  misc_feature (1543)..(1543): n is a, c, g or t
  misc_feature (1694)..(1694): n is a, c, g or t
  misc_feature (1738)..(1738): n is a, c, g or t
  misc_feature (3383)..(3383): n is a, c, g or t
  misc_feature (4863)..(4863): n is a, c, g or t
  misc_feature (4880)..(4880): n is a, c, g or t
  misc_feature (5058)..(5059): n is a, c, g or t
  misc_feature (5076)..(5076): n is a, c, g or t
  misc_feature (5078)..(5078): n is a, c, g or t
  misc_feature (5089)..(5089): n is a, c, g or t
  misc_feature (5374)..(5374): n is a, c, g or t
ttttggkgcatgggcgggaaaacsaaggtacaacmttcattggagtggtgagtatggagtggacctcaaaatctgtcctttcatttcgaggctctcagcctccattttaaaactaaatcaaacgggcgtccttcagccttataaatatgattagcattggctnccgttctaaagactcggatgtcaggcttgctggggagaacatggagaatcccccantactcacgggttattgggnatnttggccatgtttgaacnagcttcgtttcatagagaacctagccatcatgtgaggctggnagaagtcctggggcaactgagaatttccggccggggcacaccctggcgtkattcaagggcctctggaccgacgcagcctccgacagccgggtgttagcaaaggatccncagctatcctgtcgccaaattttcctcctttctctatccatggtctcttacctctctctgtgtgttcaatgtgcaggaatctttacagttcagggaaaacagkcctgttwgamaagatcagtgaatcacggcagccagggatataactcaaagggaaggcatctttgtgattttctaggaacagaaccccccaacccttccacagtaagcgtttctcttggcccttggtctggagagcacatggcatttccatgtcactctctgcccttggtctggagagcacatggcagttccaggtctctctccccttggtctggagagtacatggcagttccaggtctctctctgcccttggtctggcgagcacgtggtatttctaagccacctagtaggaataaggatcctctccatgaggcacattgccggtcctctacggaacactncagcttccaattttccctttttgcgctcttttactgctacttctgtgaacgggaagactctgctttcaacaattaggagtaaaatgtcctccgaagccgaattttagtctcgatactgtcccatcagcaggaaaacggccattcggtccctacgttcttttaaggcacctattctgtctccaattaggatggtacttaattagtaaggggawttttaagtccggaagttaaccggaaccattcttctatgggtaaatgctttagcataggccataatagcaggatacagagttcaatctagcacgccccctcccttaaaggggncttgcccaattacatggtttttcttgaaatccgtnttttggaaggcacacaggccacacaagtctagaaggtcaaagggaaataaaaggcagaggactagactgcttggggamagcgtgactaaggaactnagttcctctggtgccacggcttggagggtcacacctgcagtcacgggtggcacatttaannaggtgccgggaatccggaancaacagagagaaaatagttggggggacgccccctactgttttcgtctccaccctggatcacataccgaaaggaaggagactaaaagnacgcttttattctcacttctctttctagatgggtancagatcgtcttcaacgtgcactcccctggagtntattttgaagcactgggactccttcgaccctgaaactttgaagaaaaagtggcttattttcttttgcacaagggcatggcctttttactagacctttgcaacattgcaaaatcaacccagctcttttagcaatcatatcaggcaggcccanggagaatgattccccaaaattagagaagcaactttcaggggaancatctgaggattcctcttatttggggccccttcaagttcccttctcattacaggaccttaggcaagtaaagggagacttaggccaattttctaacgaccctgataggtatacagaagctttccaaaatttaactcaggtatttgacctctcatggagggatgttatgctgctgctaagccaaaccctaactgcggctgaaaaacaggcagctctgcaggcagmagaaaattttggagatgagcaatatgtctcctatagtaggcmaaaagggaaaagagaaaatagggaaggcgaagaaataggggaaacamcattgccaataggaagggaggcaatacttcttgacaaccctaattggaactccagamttttctatggtgtttttccttctttcacggtttaaaatggcttctatcttcttttataatgttcttccaacctgggaaaagttaattttccaaaccttaaaatgcttggcttagagttgagctagggggaagggaacccagaagcctgacatgctggcaaaagggtaaacatttcttaccagtcgggcttttggcttctctctccctgtgcaaaccggtaaaagggataataaggatcattgtttatattctctgtaaakttttaattaatgaaaaaggatttgtgaggttggtcttaagctgtagmcaatctggtgtgctttgcgtgtctttctgtatggttctgtcaaaagaaagggtaccttaggttaggatgcaggcccaggaccccataagcctgctgttcaagccagcccaacaaaatggtcagtaacaaacttggctacaggcctccatcttgtttcatgtccttgggaacatgacctgtaaccacatggcaatactttgttttagtctccgccattttacaatggtggctgtcttcttgtgctaagtcagttcctgggtgagggccacaaaatcagataagccagtttgtcaatctgggtggtgccagctgatccatcaagggcagggtttacaaaatatcttaagcactgatcttgagagcagtttagggagggtcaaaatcttgtagcctccagctgtatgactcctgagccatggtttctaatcttgtggctagtttcttggtctggtccccaggcaagagggaagtatatcttgggaaggggctgttatcatctttgttttggactatagactgtaaaccaggcccctcccaaagttggttcagcctacacccagggatgggcaaggacagcttgggggctggaaacaaaatggagttgtttgggtsggatctctttcactgtctcagtcacagttttgcaatgacagtttcaaaagctgcctatcacccctttaaaaataccttgtacactcgtggttaagtcataacctaattaaggctcgttggtttcacctgtgaggttactttttgtaaagttcaaaagccgaaaatcttaactgcttggcatggctaaagtcgagtaacaagggatttaaaaggattttcttaaagagcgctcagcttaattaaaagtggatattcaagttataggtatatttaaaaggcctttatgtttttctcttcttgaatcttgcttttctggaaaagggsttttcttctcagtcgactgaattattttctccnttttttgtcttgccactcttaatgcatgcatgagaggccctaagataacttctggtagcatgggactccttgggaaaaacagaggaggcgccacagaccccgttttgggaaaaaacccctgttttcctcatgaaaccccaggaattaaaagcagatagttccctctcaaaatcaaaggctctgttctgttttgcattgtgttatctgacagttttgagttttgggggcatcagaattacttcacattatgagagagctttggtgtgtaataactaggtaggaaatacactktaagggatgsctaatagtagttataaatcagagaagcatgctcttggccacctgaaagatatggaaacatccccaccccccactgagagatgagactmccatgggggatgggctgattacaaaataagccaattggctttgggttgccttgcaatgaaatgcatggtagaagcactacactgtcttctcccatagtatctccctccttttggggatctaaaatctagtataaaaaggcacacttaattttgggatctgcctttgccttcagctgtgcttgcttattttgccctagaaatgcatgccttcctggcactgttcctccaagggctccaccctgaagcaagtaatccaattaagaaattggcaaatacaaaaatcgtacaagtgttgaatcttctgtttgtggtcgctataaatgtgttgtgtgtaatgtctataaaaagagctctaattgattggcttaaagaaaaataggcacttaagtcaaatattttttagttcatatgactttaatctttaagaaacaaaaatagtcttaagggttattggtaaaatgcaagtgtcatcaaaattcaaataggtggtctaaatcatacaacttagatactaggtttgctaaatgttccaaggttgtattactggttgctttacagataggtaaggccttggacacgtagagttagatactagaaagagtcaaaccttatctgtacttctatctgggtcctaggttccacacctggtaaataattacaatcacttactaaccaggtttttcaccaatgtaaaaattgctaagagttaacagcgcaacatgtatttgagatgactaaacagttttatctgcaaagtgtataaaaacagtaaagtatgtcttttagtaaaagattacaagaaagcatagaaatgtaaattttgcctagggataagggattatcttaaatttgatatgataaaggtaaaggtttaagtaagttgtggaagattgtaaaaattaatcttgcaaaaaatgtgtaaacattaactaaattcaaaatagtatatatggtcttttcacaaattgagcattgaaataaaagcacagcaaggakgtcttaagacactaatctgccctttagcaaaagggttataaaaggtttgtaaagatttcacctcatggtcaaattggttaagattagatggaatnatctataaggtttcatnaaaacgaactggggttaacattaataaactaatgcaagggaaaaatttggctttgaacaggattttcatgtaatagtaaaggctaatgaaaggtttttgccttttgagtcatcattttggcaaaataagtaatttatggcaatctggaattctattttgtaacatcaagtgttttaannctctaacacttaacagncnccccaaaatcnaacttcaagtttcaaaattgtctttcctgatgcctggctttctggatggttcagagggcccctgaaacattcagaaaagaggtaaacaggatcgtttgacatgtttagtcacatgagattgccaaaatgatgtccaatcttctttaagttatattttggtgaataatactaatatatgttccaaaattgtatgggatttctaaaattctaatgtctaagtatatgctatcaatcataattaagggtaaagttattgtaaaccacggagataactaaacttctttntcagtcatgtttttaactgtaactaccctggaaattttgtcattcgcagacaattgttgtcttgctttgttccttctcaaaagatggtttataatcaagctatattaaggactttaacaggtgttctcaaatgcaggtttttaatagctttgaagattgtaacattggaatagagaaagaacgtacaggactcatgaagaactgamatgttcacaaatatcaagcaaaacaagagttaactaagtggactgcactcagaaagttaaagcaacctttttgacttttgcttggaatattgctaatccttgttttgtttttcagagtcaaggaaacttattttgaactatttacggcctttaataattgagtaaggtatactcctgtgaacaaaatttggagcatgtttgtttttctctgcctggttcctctagaatktggaaactatctgtgagtactcttaacttatggcaatatagttgtttgcatcagtgcaatacgaatccatttttctttkkcaacaggacacaattggaaaaactggttattttaccaaggctttgactggaagggtgtgcttccctttaaggagtcaakcttgacatgcagagccaataaaagccccttggggagaactggcctcataccttgtctacacagtccccacacagggttcctgacctgtggtcagtaaagaatgtcactttctaacaggtccaggagctccaagtttatcttgggaccttaagaggagaggatcacccaactcacaggtatttgaggatacgaacccatggctgggctcggctttaaggggtcttatctgagattccttgtggaacagagttccatcaaagccaatccaaaaggcctatgtagaaataaccattcttgctgcactttatgcaaataatcaggccaagtataagactaaagtttattctacaaacaacacagtcctatcataatttgtttttaccaaaaatgagaactggagagaaaaattatgccccaaagcttatcatacatttgtcattaaatcctagtctcattaattgtttttaagctttttgcctacgttttagactaaccctgcttattcctgtgaatcamgtggtgatcttctgcagcttggaakaaaagaawagggatgggkaakgtaaaaatstgaatcaatatgctggttctgggcaattatcctgcaaattctgccaggtaatwaaagtgagtgagtagggtgcccatagcctggaggtttctttgtttgggaaaataaaacmagggaacttcatagacccccaaaggggaattctaatatcttggcaagtaaaattttaggtggaaattacctgccacaccacacttgtgggaactgctgtmctcaccccactatttkcaatagsgttacacacggtascaccttmwagctgaaatattggacagagagtttccattgccgtagtattctgcttaattattatccttatagcagggatagtagttactgacgaaaaggaagcatgaaagttttactatcaccgagtctgccaggactttttactgggtttagtgatgcasttttaaatgaaacatgctgcttctggattaamamctctastaaagtagaggaaaatctacgsgtacttagagatsaaatcaaaatcattgacaggctcagggaaaatgccggcttcagccccgggtggctacaatccctctttaatgaattccwgtcttctttatggaattggttaacccctttattaagcmctstcttgcttatmtgtcttgtattgatatttggaccctgtatactcaatactgtaactcaaattgtttcctctcgcctagaagcaatcaaactccaaatggtgctgcaaaccgaaccacacgccwttcttccaaggacccttagatcgacccaggaggagccctagctgctgttmcccacwcgatgscccctttcagcaggaagtagccagaaagagtcatcgcccaawccccccaacagcagttagkgtkgmmwctccasagsggggagtgwtgc

SEQ ID NO: 424 - DNA, 7417 bp, Homo sapiens
  repeat_region (1)..(7417): hervk14ci
tctggcacccaacgtggggctccccataatctctacaaataatccagtgaagaaacgccagagcgtggaaagtggaggacgactgacaaaggttgcccgagtacgttttcacttcaggctctacgggtaagtagggtgctcggagaattccagggtaacctcgggaaaatacgggtcaggctgaaagtaaatttgcaaattacttaagcctggtgcggcagttattgtgccacagcggggcaattgtgagtacccaaaatctcacatctttgttccatctcatagaaaagtattctcctttgttcccgggatatggaaccatgaatgtaaaagattgggacaaggtcggatcagacttacaaggagcacaacaagagggttacgatatttccttctccgcttggtctgtgtggtcagcaatcaaaacagcactggagcctttctacactgaggaggatgaggagtttcaggatgacatacaaaagtttaataatcaggagtctgatgatcagcaaagtgaaccatcacagtctagtttaaaaaagggggagaaacaggaagctacatgggctaacctccaaaaacttatgaaagaaacagttccacctactgaagaaacagtgccacctactgcgcctttaggggaaggtccggaacggccacccctgcctcagccttatgaatttttgtaacgagagcctgagacgcagcttgccactcccattgttgcacgccccaccattaactatggcaaagggaagcttcagtcttgcccaacagccaattacagtgagggaatgatccaggttggtccacctgttaattatggtagaggaatgctgtgaaccggcccaaatacatattatggcgcagggataatccaggcatccatttgccaggcatgagaaatgggggatttggatgcttggcagtttctggtaattatttcgccagctgaggagcctggagaacatgctcaagcgtgctgggagccatttccttttaaaatattaaaagacttaaagcaagcagttggacaatatgggccaaattctccttatgttcattccttgttacaatctgtggcgtataaccagcatttaatacctatggattgggagacattagcctgatccaccctgccccctctcaatttctccaatttaaaacctggtggatggatgaagcaataaatcaggcatgcagaaatgctcaagcccaaactttcattaatatcacatctgatcaattgcttggaagtggacaggcatggggtactctaaatcaacagatggtaatgggtgatgaggctgttgatcagctcagaactatatgcctaagagcctgggaaaaaattcactaccctggtactacttatccttcttttaactcagtttgacagggtcgaagggagccttatccagattttatcgttcgtttgcaagatgcggctcaaaaggctatttcggattttcatgccaggaaagtgatcgtccagctacttgcttatgaaaatgctaatacagaatgtcaggcagcaattagacctattaaaggaaaggcagatctaaatgaggaaaaaactttaagagtatacattaaagcctgtgatggcattggcaggcacttatataaggccagcctccttgctcaaggaatggctggactaagggtaacaaaaaacatatgagtgtgccctggatcttgctataattgtggacagataggacatacaaaaagagagtgtacaaagagccaaaaaaggcaaaactcaggaggaaaaagcagggaaccaagtacctttcctagaagtaaaaaaggaaaagactgtgctaatcaatgtcattcaaagtttgatgacagcagacagacagaacttgccaggaaacggacagaagggccagccctgggccccgattcaaaatggggcattcccaattcaggatgggatgtccccaactccaaacggagtgtcctcagcccagtctatccctgtacgaatgtacaggaattgtccccctccacagctaaaagcgggccagtagatttatgctgtaccgaagccgtatccctccttcctggggagcctcctaggaaggtctcagtggaagtttatggcccattgcgaaatggcacggtgggacttatactgggaaggtccagcttaaacttaaaaggaattcaagtacatactggagtagtggactctgattgccagggagaaattcaaattgttatctcctccactgttccctggagtgctaatcaaggtgacagaatagctcaaatgttgcttttaccatatgttaagttaggagaaagctcagaaaaaagaacaggaggatttggaacacaaattcagcaggcaatgctacctattgggtacatcaagtctctgacaatagacctatttgtatggttactattcaaggaaaacaatttgagggtctggtggacacagaagcagacgtgtcgatcatagctctttatcaatggccaaaaaactggcccaaacaaaaggccccagtaggtcttgttggggtcagaattgcttcagaagttttccaaagtacttttatcttaccatgtcttggtccagaagaacaggaaggcacactacaacctctaattatgcccattcttgataacttatgggggagagatctgcttcagcaatggggcacagaaatttcaatcccttctccccagtttggtcaagctagtcaaaaaataatgtcaaacatgggctatgttcccagaaaaggcctaggaagacagggggctggcattattgaacccatacaagttactgtaaaaaatgactgaaaaggattaggttaccatttttagggctggtcactgttgagtctccaagttctattcccttaaaatggaagacccaaaatcctgtttgggttgagcaggggccactttctcaggaaaaattgggggccttacaggaattagtcaaagagcaattaaacaaaggaaacattgagcccacatttcctccatggaattcgctcgtgtttgtaataaagaaaaaatccggcagatggcgcatgctaaccgacttacgagcggtcaatgcagtcatccagccgatgggggccctgcagccagggcttccatcccccaccatgattcctagagactggccattaataattatagatttgaaggattgcttttttaatattcctctagcagagtccgattttgagaaatttgcttttactattcctgctatgaacaacaaggaaccagcagccagatatcattggaaagtcttgccgcagggtatgttgaatagtcctactgtttgtcaaacttttgtggggaaggctattcaacctgtgagagatcagtttccagattcgtatatcattcattatatggatgacatattgtgtgcggccgaaaatcgagaccaacttattcagtgttactcatatttacaggaggtggtagccaatgctggattgctcatagcaccagataaaattcaaaccgccactcctttccaatatttggaaatgcaggttcaggaaagggcaattaaaccacaaaaggttcaaattcgaaaagactctctgaaaactaaatgattttcaaaaattattaggggatatcagttgaatttgacctactttgggaatccctaccatgttatgtctaatctgttctctattttaagaggagaccctgctctcaatagtaaatgataactgactcctgaggctgacaaagaattacaaataattgaagaaaaaatacaacaggcccaggttaatagaatagagtcaagtttaccattacagttcattgtgttccctactctccattctcctacaggggttatagctcagagtgaggacttagttgaatggtcttttctgcctcacaatactgttagaacactcacagtatacttggatcagatggcaatcttgattgagcaagcttgccttagagttgttaaactttgtggctcagatccagataagattataattccaatgaataaaatcagatttggcaagcctttgttaattcggtcaattggcaaataaatttagctggcttcattggagttcttgacaatcattatccaaaaaacaaaatttttcagtttttaaagctaacatgggtccttccaaaaattacccgtagtgctccattggaaggagcagtgactgtgtttacagatggctctagtaatggaaaagcagcttacgtacgacctaaaaacacaattattcaaactgactttcaatcggcacagaaggctgaattacaggcagttataggtgtgttcgaaaactttaagcaaactgtaaatattgtctttgattcagcttatgttgttcaagccactcaacacatagaaactgcactcattaaatatctggtggatgaacaactctatcagctgttttcttctttacaaaaggcagtgcatgatcaccgttttcctttctatattacacacatttgagcacacactaatcttcctgggccccttgtaagggctaatgatcaagctgatttattaatttccactgtgcttactaatgtccaagattttcactccctaacacgttaatgcagcaggacttaaacaaaaataacaaattacttggagacaggcaaagggcattgtgcaacattgccctcagtgccaggtagtacaactgccacgtgaaaggactggtgttaacccacagggattaacccccaatatgttgttgcaaaaggacctaacccatgtacctttgttcgggaaactttcatacgtccatgttactatagataccttttctcattttgtatgggcaacttgccaaacaggcgaggcggctgctcatattaagacattacttccctgtttcgctgccatgggcatcccacaaaagattaaaacaaacaatggcccaggctactgtagtaaatctttacaggcgttcctttaacagtggaacatcgagcacagtactggaataccctataattctcaaggtcaagccactgttgaacaggctaatcgaaccttaaaatctcaattacaaaaacaaaagacagagggggaaaccagagaatacgctactccttatatgcagctacaattggctcttatcacttcacattttctgaatttgtctagagatcacgttacaatggcagcagagcagcatttgacaaggcaaaaaataaatgcttatgaaggaaaacatgtgtggtggaaggacatcagaaccaaaacctgggaaaagggcaaaatcattacatggggtcgaggrttttcttgtatctcaccaggagagaatcagcttcctgtctgggtgcccacaagacatcttaagctgtgccatgagccagaatccaaggaagaggaaaagacctcggaacgtccctgcgcccccagttcgtcagacggctcagatgaacatctctgttgagcagatggaaaccagtaaaactcgccaagcaactccaccgacctgggggcagatgaagagactagctcacattgcagaagagaacctgaggtctcagaacaagctgctgaccaccagtaatctaatggtagctatgatggcggtaatctccttggcggtgagtctccccgtagctgaggcagatcaaaattacacttattgggcctacattccattcccaccactgattaggtctgttacatggttagaccccctggtggaggtttatgttaatgatagtatctggatgcctggaccaacagataaccgaggtcctactcatccagaggaggaaggaatgttaatgaatgtttccattggttatcgctttccttccatctgcctggggccagcagcaggatgtttaaattatgataaacaaatttggatggcttgtgtccctgcaaataatggatcaaaagcccctattcatgcaatcagtggaagaacatttcaatctttggacactattaaataccttgagcacggctatgttatgacacatcgccagattaataaatataaacctaataagaagccctgccctaggaaggccactaaatggtctggaaagctagaggtgctaacctgggaagattgtattgcaaacagcactgctgtactgcaaagtaattcctatggaatcgtcattgattgggcccctatgggacgctttgcagtaaattgtactggacagtgcgaagatggtagagagactccttttgcaaacgactacccagataatgcaccaaaattatatagaaaaattaaaacaaattaccctattaagtgggaggaaaacggtatggctctttcaagcccaaaaatgattgatccaattataagtccagaacatctagaattgtggaaattaatgatggctcaaaccccaattcggatttggaaaggagaatataaaacaaagacccttagtaaaaaacttcgatttgtcgtagccatgacctctaatcagacgttcccattgcagagttttgttaaacctcctcttatgttggcagtgggaaaaattaatatcctacctgactctcaaaccatatcatgcctcaactgtcatctttttacctgcgttaattctacctttaataaagataacagcattttaccggttagggcccaagtgggagtttgaatacctgtatccctcaatagaccttgggaggcctctccctccatacatattatcacggaagtactaaaaggaatacttaatagatcacagagattcatatttactttaatagctgtgatcatgggccttatagctgtcacagctactgctgctgctgctggtgttgctttgcactcttctattcaaactgcgggctttgtggatagttggcagaaaaattcttctaagctttggaattcccaaagccaaatagatcaaaaattggcaaatcaaattaatgatctctgtcaaacagtaatttggatgggagattggattatgaacttggagcatagaattcaaatgcaatgtgattggaatacttccgatttttgtattactcatagctcctataatgccattgaacaccagtgagagacgattagacgtcacctacaaggaaaaaaagataatttaacattagatattgctaaactgaaaaaacaagtttttgaggcatctcaggctcatctcaccctattgcctggagctgatattcttgctggagcctctgatggcctttctaataccaatcctttaaagtggattgaaaccataggtggatcaacaattgcaaattttattttggtttgtgtctgtttatgttgcttgtttttagtctacagatgcagatggtgccttgggagagaaaccagacaccatgaatgagccataatagcaatggcagttattaataaaaaaaaatcaatagaggcaaaaaaggggaaca

SEQ ID NO: 425 - DNA, 3285 bp, Homo sapiens
  repeat_region (1)..(3285): l1me_orf2
  misc_feature (10)..(10): n is a, c, g or t
  misc_feature (15)..(15): n is a, c, g or t
  misc_feature (354)..(354): n is a, c, g or t
  misc_feature (739)..(739): n is a, c, g or t
  misc_feature (1171)..(1171): n is a, c, g or t
  misc_feature (1639)..(1639): n is a, c, g or t
  misc_feature (1757)..(1757): n is a, c, g or t
  misc_feature (1876)..(1876): n is a, c, g or t
  misc_feature (1887)..(1887): n is a, c, g or t
  misc_feature (1962)..(1962): n is a, c, g or t
  misc_feature (2110)..(2110): n is a, c, g or t
  misc_feature (2174)..(2174): n is a, c, g or t
  misc_feature (2177)..(2177): n is a, c, g or t
  misc_feature (2238)..(2238): n is a, c, g or t
  misc_feature (2902)..(2902): n is a, c, g or t
atggcagacntaaancctaacatatcaatrmttacattaaatgtaaatggattaaacactccaatcaaaagatacagattgtcagagtggataaaaaaacaacacccaacaatatacwgcctatmagagacacaccttaaatataaagacacasataggttgaaartaaaagaatggaaaaagatataccatgcaaatwgtaaccaagagaaagccggagtggctatattaatatcagacaaagtagactttaaaccaagaaatattactagagataaagagggacatttcataatgataaaagggtcaatctatcagaaagacataacaatcctaaatatatatgcacccaanatcagagcaccaaaatacataaagcaaatactaatagaactgaaaagagaaatagacaaatccacaataatagttggagacttcaataccccactgtcagtaattgatagatcaactagacagaaaatcaataaggatatagaagacttgaacaacactatcaaccaactggacctaattgacatattatagaacactccacccaacaacagcagaatacacattcttytcaagtgcacatggaacattcaccaagatagaccatatgctrggccataaaacaagtctcaataaatttaaaaaaattgaaatyatacaaagtatgttctctgaccacaatggaataaaawtagaaatcaataacaaaaagatactctggaaaatncacaaatacttggaaattaaacaacatacttctaaataactcatgggtcaaagaagaaatcaaaagagaaattaaaaaatattttgaaataaatgaaaatgaaaayacaacatatcaaaaatttatgggatgcagctaaagcagtgcttagagggaaatttatagcattaaatgcctatattaaaaaagaagaaagatctcaaatcaataacctaagtttccaccttaagaaactagaaaaagaagagcaaattaaacccaaagtaagcagaagaaaggaaataataaagattagagcagaaataaatgaaatagaaaacagaaaaacaatagaaaaaatcaataaaaccaaaagttggttctttgaaaagataaaattgacaaacctttagctagactaaaaaaaagagagaagacacaaattactaatanatcagaaatgaaagaggagayattactacagatyctacagaaataaaaaggataataagagaatactatgaacaactttatgccaataaatttgataacctagatgaaatggacaaattccttgaaacacacaaactaccaaaactgactcaagaagaaatagaaaatctgaatagacctataactattaaagaaattgaatcagtaattaaaaaccttccaacaaagaaaagtccaggaccagatggcttcactggtgaattctaccaaacatttaaagaattaataccaatcctactcaaactcttccaaaaaatagaagaggagggaatacttcctaactcattctatgaggccagcattaccctgataccaaaaccagacaaagacattacaagaaaagaaaactacagaccaatatccctgatgaacatagatgcaaaaatcctcaacaaaatactagcaaancaaatccaacagcacatgaaaaggattatacaccatgaccaagtgggatttatcccagggatgcaaggctggtttaacatayaaaaatcaaycaatgtgatwcactacatyaacagrntaaaggagaaaaatcatatgatcatctcaatagatgcagaaaaagcatttgacaaaattcaacatccattcatgataaaaactctcaataaactaggaatagaaaggaacttcctcaanataataaaggnmatatatgacaaacctacagctaacatcatacttaatggtgaaaaactgaaagcwtttcccctaagatcaggaanaagacaaggatgtctactctcaccatttctattcaacattgtactggaagtcctagccagtgcaataaggcaagagaaagaaataaaaggcatacagattggaaaggaagaagtaaaactgtctttattkgcagatgacatgattttntatatagaaaatyctaaagaatccacaaaaaaacwactagaactaataaataaatttagcaagntcncaggatacaaggtcaatatacaaaaatcaattgtatttctatatactagcaacgaacaatntgaaaatgaaattaagaaaacaatwccatttacaatagcatcaaaaaaataaaatacttaggaataaatttaacaaaatayatrcaagacttgtacgctgaaaactacaaaacattgatgaaagaaattwaagaagacctaaataaatggagagatataccatgttcatggattggaagactcaatattgttaagatgkcaatactccccaaattgatctatagattcaatacaatcccaatcaaaatcccaatggttttttttgtagaaattgacaarctgattctaaaatttatatggaaatgcaaaggatccagaatagccaaaacaattttgagaaagaagaacaaagttggaggactcacattacctgatttcaaaacttactayaaagctacagtaatcaagacagtgtggtattggtataaggatagacatatagatcaatggaacagaatagagaacccagaaatagacccacacatatatggtcaaytaatttttgacaaaggtgccaaggcaattcaatggggaaagaatagtcttttcaacaaatggtgctggaacaactggatatccatatgcaaaaaaatgaasttmgacccctacctcacaccatatacaaaaattaactcaaaatggatyatagacctaaatgtaaaanctaaaactataaaactyttagaagaaaacataggagaaaatcttcgtgaccttgggytaggcaawgatttcttagatatgacacmaaaagcacaagcaacaaaaggaaaaattgataaattggacttcatcaaaattaaaaacttctgctcttcaaaagacacyatcaagaaaatgaaaagacaagccacagactgggagaaaatatttgcaaawcatatatctgacaaaggacttgtatccagaatatataaagaactcttacaactcaataataaaaagacaaataacccaattaaaaaatgggcaaaggayttgaacagacatttcwccagagaagatatacaaatggccaataagcacatgaaaagatgctcaacatca

SEQ ID NO: 426 - DNA, 1708 bp, Homo sapiens
  repeat_region (1)..(1708): ricksha_0
gggtttggatcataatcccaaaagacacaatcccaaacgccataatcccgaatgttgaaatcccgaaagatcaaaatccctaaagtctaaaatccctaaagtctaaaatcccaaaaattcacacaggatggttgcatcatgttaggcagaactgttattttcttattgtctttatgcagaaaaaatggattttaattgaatccccaaaccataatgacagatttggaattaggtgcgatcaaggcttctaaaagtgaatttcaaggtgttaccaataaagtttgtttttttccattcagcccaatgcatttggtggaaaattcagatgagtggattggccatgcgatacggcaacgacgaaaacttcagtttaaaaatgcgtcatttgcctgcattggcattccttccagctgatgacattccgggagcttttaatgaattaaagccgcatttgcctgaagaagtcagcgaagttactgactggttcgaaaataattatgtgcacggtaggataagaagacacttacacaacggtgttgccgttcgattaccagtattgtttctaccaaatttgtggtctgtatatgagtgcatgcagaatggatttctatatacccaaaacaacatagaagcatggcacagaagatgggaaaatttaatagggaatgctcatgtcggtgtatatcgaatcagaagattcaaaaagagcagcgccacgtagaaaatgaatgtgaacatattctccgaggagagccatgtcctaaaagaaaaaaaaaagcagctattcatcgcgatgcaagacttcaaaatatagttaatgatcgtgaaagtcggccagctcttatggactatctccgtgcaattgcccataatctatccctgtaatatactttttcatatgtcgaattttctttttagttttttttcactattttaaattgtcagcattattttttacaattcgctatgctatgtatttcatcttcgcatcatttccaatactggaggtataaattgtgtaaagacttttagagagttctaattcgttttatgcattttttgcaaatttgactccacgaaagtgcattatcacaacgttgactttgtgtgtaagcattgtgcgtgtacgtaaaaacgttgaaacttcctcaataaatgaagagatgtcctttttgtacatctgcatttgtgaaagataaaatttctcgagatctcggctctttgggcgactgcatatgcagtggtgacccatcgcggtttttgatcgatctcgtcaaaagacttaggttgttcgtcacggtatttcagatgaccgcagttataaagctgggtgcacacaattaccaaccatagtgatatgcgtttatacatttccctttttgacctatttctttatgaatacggttcgtctgctcataactgttatacccgtgcgactgtcattagtatacctgagtgtttatgcttgcaaaaatatgtatgttattattgcctattttattgtgtaaagtggcctatgaagtgttctgtcatgtttttatatgtttctcaaataaatccccttttaaaaatgtaaataaatatcttttaaaaaatttttaaattattttttccagaattatatttttgggattttgatctttcgggatttcaacattcgggattatggcgttcgggattgtgtctttcgggattatgatcggctccc

SEQ ID NO: 427 - DNA, 351 bp, Homo sapiens
  repeat_region (1)..(351): tigger5_a
cagatgctcctcgacttacgatggggttacatcccgataaacccatcgtaagttgaaaatattgtaagtcgaaaatgcatttaatacacctaacctaccgaacatcatagcttagcctagcctaccttaaacatgctcagaacacttacattagcctacagttgggcaaaatcatctaacacaaagcctattttataataaagtgttgaatatctcatgtaatttaytgaatactgtactgaaagtraraaacagtatggttgtatgggtacttgaagtacggtttctactgaatgtgtatcgctttcgcaccatcgtaaagttgaaaaatcgtaagttggggaccatctg

SEQ ID NO: 428 - DNA, 446 bp, Homo sapiens
  repeat_region (1)..(446): tigger5_b
cagatgctcctcgacttacgatggggttacatcccgataaacccatcgtaagttgaaaatattgtaagtcgaaaatgcatttaatacacctaacctaccgaacatcatagcttagcctagcctaccttaaacatgctcagaacacttacattagcctacagttgggcaaaatcatctaacacaaagcctattttataataaagtgttgaatatctcatgtaatttactgaayayartacactgtagartayyggttgtttaccctcgtgatcgcgcggctgactgggarctgcggytcactgycgctgcccagcatcgcgacagagtattgtaccgcatatcgcyagcctgggaaaagatcagaaattcgaagtacggtttctactgaatgcgtatcgctttcgcaccatcgtaaagttgaaaaatcgtaagttgggaaccatctg

SEQ ID NO: 429 - DNA, 30 bp, Homo sapiens
  misc_feature (1)..(30): oligonucleotide HIRA genomic sequence (positions 853946-853975)
cctacccttttcccgccccatttccaaccc

SEQ ID NO: 430 - DNA, 32 bp, Homo sapiens
  misc_feature (1)..(32): oligonucleotide HIRA genomic sequence (positions 859116-859085)
tgttcccctcaccttcctaactcagtgccctc

SEQ ID NO: 431 - DNA, 33 bp, Homo sapiens
  misc_feature (1)..(33): oligonucleotide for HIRA genomic sequence (postions 819901-819933 )
ccgtcttttgtcttcacaaccaagcccagagcc

SEQ ID NO: 432 - DNA, 34 bp, Homo sapiens
  misc_feature (1)..(34): oligonucleotide for HIRA genomic sequence (positions 823592-82355 9)
cactgcctgctcccccaaattgcaaaatgttgtc

SEQ ID NO: 433 - DNA, 30 bp, Homo sapiens
gtacttggctgatggtggcacaggctaggg

SEQ ID NO: 434 - DNA, 32 bp, Homo sapiens
  misc_feature (1)..(32): oligonucleotide for HIRA genomic sequence (positions 846946-84691 5)
actggatgtggcacctgactttcaaggctgac

SEQ ID NO: 435 - DNA, 32 bp, Homo sapiens
  misc_feature (1)..(32): oligonucleotide for HIRA genomic sequence (positions 875226-87525 7)
tggctttgacatctgaggcagagaaaccacgc

SEQ ID NO: 436 - DNA, 33 bp, Homo sapiens
  misc_feature (1)..(33): oligonucleotide for HIRA genomic sequence (positions 878074-87804 2)
gccgagcaatacatcaactcatgaccacgggag

SEQ ID NO: 437 - DNA, 35 bp, Homo sapiens
  misc_feature (1)..(35): oligonucleotide from PAC clone containing Necdin gene (positions 72122-72156)
ctcctcaagtgtcttcccagctacctcccagtttc

SEQ ID NO: 438 - DNA, 30 bp, Homo sapiens
  misc_feature (1)..(30): oligonucleotide from PAC clone containing Necdin gene (positions 75666-75637)
cagagccagcccccaccttaagtatggcac

SEQ ID NO: 439 - DNA, 35 bp, Homo sapiens
  misc_feature (1)..(35): oligonucleotide from PAC clone containing Necdin gene (Positions 94501-94535)
accctctgattcaggaaaggggtgcatacatggtc

SEQ ID NO: 440 - DNA, 35 bp, Homo sapiens
  misc_feature (1)..(35): oligonucleotide from PAC clone containing Necdin gene (positions 98601-98667)
ctttcacaccgtcacccagtcacatacaccaacac

SEQ ID NO: 441 - DNA, 32 bp, Homo sapiens
  misc_feature (1)..(32): oligonucleotide from PAC clone containing Necdin gene (Positions 76608-76639)
gcctggaaatcaatgcagccaactctgtcttc

SEQ ID NO: 442 - DNA, 31 bp, Homo sapiens
  misc_feature (1)..(31): oligonucleotide from PAC clone containing Necdin gene (positions 78898-78867)
ggcatgatactcagtgaaagacgccagtctc

SEQ ID NO: 443 - DNA, 30 bp, Homo sapiens
  misc_feature (1)..(30): oligonucleotide primer for CDC2L1 gene coordinates 13960-13931
cccccacccacatctccttgcagaagatcc

SEQ ID NO: 444 - DNA, 30 bp, Homo sapiens
  misc_feature (1)..(30): oligonucleotide primer sequence for CDC2L1 gene (positions 9137-9 167)
cctcggtttaccacctgccttggctccttg

SEQ ID NO: 445 - DNA, 30 bp, Homo sapiens
  misc_feature (1)..(30): oligonucleotide primer for CDC2L1 gene (positions 13028-13057)
agctgcgacttctgctacggtgatgcccac

SEQ ID NO: 446 - DNA, 33 bp, Homo sapiens
  misc_feature (1)..(33): oligonucleotide primer for CDC2L1 gene (positions 17753-17720)
ggctgggatggccttttgttcacactggttttg

SEQ ID NO: 447 - DNA, 69 bp, Artificial Sequence
  Description of Artificial Sequence: repetitive sequence found in many eutherial genomes. Length of core repeating element is varia ble and is often polymorphic
aaaaaaaaaaaaaaaaaaaaaaaaaaaaaaaaaaaaaaaaaaaaaaaaaaaaaaaaaaaaaaaaaaaaa

SEQ ID NO: 448 - DNA, 69 bp, Artificial Sequence
  Description of Artificial Sequence: repetitive sequence found in many eutherial genomes. Length of core repeating element is varia ble and is often polymorphic
ccccccccccccccccccccccccccccccccccccccccccccccccccccccccccccccccccccc

SEQ ID NO: 449 - DNA, 69 bp, Artificial Sequence
  Description of Artificial Sequence: repetitive sequence found in many eutherial genomes. Length of core repeating element is varia ble and is often polymorphic
agagagagagagagagagagagagagagagagagagagagagagagagagagagagagagagagagaga

SEQ ID NO: 450 - DNA, 69 bp, Artificial Sequence
  Description of Artificial Sequence: repetitive sequence found in many eutherial genomes. Length of core repeating element is varia ble and is often polymorphic
acacacacacacacacacacacacacacacacacacacacacacacacacacacacacacacacacaca

SEQ ID NO: 451 - DNA, 69 bp, Artificial Sequence
  Description of Artificial Sequence: repetitive sequence found in many eutherial genomes. Length of core repeating element is varia ble and is often polymorphic
caacaacaacaacaacaacaacaacaacaacaacaacaacaacaacaacaacaacaacaacaacaacaa

SEQ ID NO: 452 - DNA, 69 bp, Artificial Sequence
  Description of Artificial Sequence: repetitive sequence found in many eutherial genomes. Length of core repeating element is varia ble and is often polymorphic
caaacaaacaaacaaacaaacaaacaaacaaacaaacaaacaaacaaacaaacaaacaaacaaacaaac

SEQ ID NO: 453 - DNA, 69 bp, Artificial Sequence
  Description of Artificial Sequence: repetitive sequence found in many eutherial genomes. Length of core repeating element is varia ble and is often polymorphic
tcatcatcatcatcatcatcatcatcatcatcatcatcatcatcatcatcatcatcatcatcatcatca

SEQ ID NO: 454 - DNA, 69 bp, Artificial Sequence
  Description of Artificial Sequence: repetitive sequence found in many eutherial genomes. Length of core repeating element is varia ble and is often polymorphic
ccaccaccaccaccaccaccaccaccaccaccaccaccaccaccaccaccaccaccaccaccaccacca

SEQ ID NO: 455 - DNA, 69 bp, Artificial Sequence
  Description of Artificial Sequence: repetitive sequence found in many eutherial genomes. Length of core repeating element is varia ble and is often polymorphic
cctacctacctacctacctacctacctacctacctacctacctacctacctacctacctacctacctac

SEQ ID NO: 456 - DNA, 69 bp, Artificial Sequence
  Description of Artificial Sequence: repetitive sequence found in many eutherial genomes. Length of core repeating element is varia ble and is often polymorphic
cgcgcgcgcgcgcgcgcgcgcgcgcgcgcgcgcgcgcgcgcgcgcgcgcgcgcgcgcgcgcgcgcgcgc

SEQ ID NO: 457 - DNA, 69 bp, Artificial Sequence
  Description of Artificial Sequence: repetitive sequence found in many eutherial genomes. Length of core repeating element is varia ble and is often polymorphic
cgaacgaacgaacgaacgaacgaacgaacgaacgaacgaacgaacgaacgaacgaacgaacgaacgaac

SEQ ID NO: 458 - DNA, 69 bp, Artificial Sequence
  Description of Artificial Sequence: repetitive sequence found in many eutherial genomes. Length of core repeating element is varia ble and is often polymorphic
cggacggacggacggacggacggacggacggacggacggacggacggacggacggacggacggacggac

SEQ ID NO: 459 - DNA, 69 bp, Artificial Sequence
  Description of Artificial Sequence: repetitive sequence found in many eutherial genomes. Length of core repeating element is varia ble and is often polymorphic
gaagaagaagaagaagaagaagaagaagaagaagaagaagaagaagaagaagaagaagaagaagaagaa

SEQ ID NO: 460 - DNA, 69 bp, Artificial Sequence
  Description of Artificial Sequence: repetitive sequence found in many eutherial genomes. Length of core repeating element is varia ble and is often polymorphic
gaaagaaagaaagaaagaaagaaagaaagaaagaaagaaagaaagaaagaaagaaagaaagaaagaaag

SEQ ID NO: 461 - DNA, 69 bp, Artificial Sequence
  Description of Artificial Sequence: repetitive sequence found in many eutherial genomes. Length of core repeating element is varia ble and is often polymorphic
gacagacagacagacagacagacagacagacagacagacagacagacagacagacagacagacagacag

SEQ ID NO: 462 - DNA, 69 bp, Artificial Sequence
  Description of Artificial Sequence: repetitive sequence found in many eutherial genomes. Length of core repeating element is varia ble and is often polymorphic
ggaggaggaggaggaggaggaggaggaggaggaggaggaggaggaggaggaggaggaggaggaggagga

SEQ ID NO: 463 - DNA, 69 bp, Artificial Sequence
  Description of Artificial Sequence: repetitive sequence found in many eutherial genomes. Length of core repeating element is vari able and is often polymorphic
gcagcagcagcagcagcagcagcagcagcagcagcagcagcagcagcagcagcagcagcagcagcagca

SEQ ID NO: 464 - DNA, 69 bp, Artificial Sequence
  Description of Artificial Sequence: repetitive sequence found in many eutherial genomes. Length of core repeating element is varia ble and is often polymorphic
gccgccgccgccgccgccgccgccgccgccgccgccgccgccgccgccgccgccgccgccgccgccgcc

SEQ ID NO: 465 - DNA, 69 bp, Artificial Sequence
  Description of Artificial Sequence: repetitive sequence found in many eutherial genomes. Length of core repeating element is varia ble and is often polymorphic
gccagccagccagccagccagccagccagccagccagccagccagccagccagccagccagccagccag

SEQ ID NO: 466 - DNA, 69 bp, Artificial Sequence
  Description of Artificial Sequence: repetitive sequence found in many eutherial genomes. Length of core repeating element is varia ble and is often polymorphic
gcccgcccgcccgcccgcccgcccgcccgcccgcccgcccgcccgcccgcccgcccgcccgcccgcccg

SEQ ID NO: 467 - DNA, 69 bp, Artificial Sequence
  Description of Artificial Sequence: repetitive sequence found in many eutherial genomes. Length of core repeating element is varia ble and is often polymorphic
ggaaggaaggaaggaaggaaggaaggaaggaaggaaggaaggaaggaaggaaggaaggaaggaaggaag

SEQ ID NO: 468 - DNA, 69 bp, Artificial Sequence
  Description of Artificial Sequence: repetitive sequence found in many eutherial genomes. Length of core repeating element is varia ble and is often polymorphic
ggcaggcaggcaggcaggcaggcaggcaggcaggcaggcaggcaggcaggcaggcaggcaggcaggcag

SEQ ID NO: 469 - DNA, 69 bp, Artificial Sequence
  Description of Artificial Sequence: repetitive sequence found in many eutherial genomes. Length of core repeating element is varia ble and is often polymorphic
gggagggagggagggagggagggagggagggagggagggagggagggagggagggagggagggagggag

SEQ ID NO: 470 - DNA, 69 bp, Artificial Sequence
  Description of Artificial Sequence: repetitive sequence found in many eutherial genomes. Length of core repeating element is varia ble and is often polymorphic
atatatatatatatatatatatatatatatatatatatatatatatatatatatatatatatatatata

SEQ ID NO: 471 - DNA, 69 bp, Artificial Sequence
  Description of Artificial Sequence: repetitive sequence found in many eutherial genomes. Length of core repeating element is varia ble and is often polymorphic
taataataataataataataataataataataataataataataataataataataataataataataa

SEQ ID NO: 472 - DNA, 69 bp, Artificial Sequence
  Description of Artificial Sequence: repetitive sequence found in many eutherial genomes. Length of core repeating element is varia ble and is often polymorphic
taaataaataaataaataaataaataaataaataaataaataaataaataaataaataaataaataaat

SEQ ID NO: 473 - DNA, 69 bp, Artificial Sequence
  Description of Artificial Sequence: repetitive sequence found in many eutherial genomes. Length of core repeating element is varia ble and is often polymorphic
ctactactactactactactactactactactactactactactactactactactactactactacta

SEQ ID NO: 474 - DNA, 69 bp, Artificial Sequence
  Description of Artificial Sequence: repetitive sequence found in many eutherial genomes. Length of core repeating element is varia ble and is often polymorphic
tacatacatacatacatacatacatacatacatacatacatacatacatacatacatacatacatacat

SEQ ID NO: 475 - DNA, 69 bp, Artificial Sequence
  Description of Artificial Sequence: repetitive sequence found in many eutherial genomes. Length of core repeating element is varia ble and is often polymorphic
tagatagatagatagatagatagatagatagatagatagatagatagatagatagatagatagatagat

SEQ ID NO: 476 - DNA, 69 bp, Artificial Sequence
  Description of Artificial Sequence: repetitive sequence found in many eutherial genomes. Length of core repeating element is varia ble and is often polymorphic
tcaatcaatcaatcaatcaatcaatcaatcaatcaatcaatcaatcaatcaatcaatcaatcaatcaat

SEQ ID NO: 477 - DNA, 69 bp, Artificial Sequence
  Description of Artificial Sequence: repetitive sequence found in many eutherial genomes. Length of core repeating element is varia ble and is often polymorphic
tccatccatccatccatccatccatccatccatccatccatccatccatccatccatccatccatccat

SEQ ID NO: 478 - DNA, 69 bp, Artificial Sequence
  Description of Artificial Sequence: repetitive sequence found in many eutherial genomes. Length of core repeating element is varia ble and is often polymorphic
tgaatgaatgaatgaatgaatgaatgaatgaatgaatgaatgaatgaatgaatgaatgaatgaatgaat

SEQ ID NO: 479 - DNA, 69 bp, Artificial Sequence
  Description of Artificial Sequence: repetitive sequence found in many eutherial genomes. Length of core repeating element is varia ble and is often polymorphic
ttaattaattaattaattaattaattaattaattaattaattaattaattaattaattaattaattaat
